(19) United States
(12) Patent Application Publication
(10) Pub. No.: US 2019/0032115 A1
(43) Pub. Date: Jan. 31, 2019

(54) GENETIC TESTING FOR PREDICTING RESISTANCE OF GRAM-NEGATIVE PROTEUS AGAINST ANTIMICROBIAL AGENTS

(71) Applicant: Ares Genetics GmbH, Vienna (AT)

(72) Inventors: Susanne Schmolke, Erlangen (DE); Cord Friedrich Stahler, Hirschberg an der Bergstrasse (DE); Andreas Keller, Puttlingen (DE); Christina Backes, Saarbrucken (DE)

(21) Appl. No.: 15/745,253

(22) PCT Filed: Jul. 21, 2016
(86) PCT No.: PCT/EP2016/067440

§ 371 Date: Jan. 16, 2018

(30) Foreign Application Priority Data
Jul. 21, 2015 (EP) PCT/EP2015/066658

(51) Int. Cl. C12Q 1/689; G06F 19/24

(52) U.S. Cl. CPC C12Q 1/689; C12Q 2600/156; C12Q 2600/106; G06F 19/24

(57) ABSTRACT

The invention relates to a method of determining an infection of a patient with Proteus species potentially resistant to antimicrobial drug treatment, a method of selecting a treatment of a patient suffering from an antibiotic resistant Proteus infection, and a method of determining an antibiotic resistance profile for bacterial microorganisms of Proteus species, as well as computer program products used in these methods. In an exemplary method, a sample 1, is used for molecular testing 2, and then a molecular fingerprint 3 is taken. The result is then compared to a reference library 4, and the result 5 is reported.

[0001] The present invention relates to a method of determining an infection of a patient with Proteus species potentially resistant to antimicrobial drug treatment, a method of selecting a treatment of a patient suffering from an infection with a potentially resistant Proteus strain, and a method of determining an antimicrobial drug, e.g. antibiotic, resistance profile for bacterial microorganisms of Proteus species, as well as computer program products used in these methods.

[0002] Antibiotic resistance is a form of drug resistance whereby a sub-population of a microorganism, e.g. a strain of a bacterial species, can survive and multiply despite exposure to an antibiotic drug. It is a serious and health concern for the individual patient as well as a major public health issue. Timely treatment of a bacterial infection requires the analysis of clinical isolates obtained from patients with regard to antibiotic resistance, in order to select an efficacious therapy. Generally, for this purpose an association of the identified resistance with a certain microorganism (i.e. ID) is necessary.

[0003] Antibacterial drug resistance (ADR) represents a major health burden. According to the World Health Organization's antimicrobial resistance global report on surveillance, ADR leads to 25,000 deaths per year in Europe and 23,000 deaths per year in the US. In Europe, 2.5 million extra hospital days lead to societal cost of 1.5 billion euro. In the US, the direct cost of 2 million illnesses leads to 20 billion dollar direct cost. The overall cost is estimated to be substantially higher, reducing the gross domestic product (GDP) by up to 1.6%.

[0004] Proteus is a genus of Gram-negative Proteobacteria. Proteus bacilli are widely distributed in nature as saprophytes, being found in decomposing animal matter, in sewage, in manure soil, and in human and animal feces. They are opportunistic pathogens, commonly responsible for urinary and septic infections.

[0005] In general the mechanisms for resistance of bacteria against antimicrobial treatments rely to a very substantial part on the organism's genetics. The respective genes or molecular mechanisms are either encoded in the genome of the bacteria or on plasmids that can be interchanged between different bacteria. The most common resistance mechanisms include:
[0006] 1) Efflux pumps are high-affinity reverse transport systems located in the membrane that transports the antibiotic out of the cell, e.g. resistance to tetracycline.
[0007] 2) Specific enzymes modify the antibiotic in a way that it loses its activity. In the case of streptomycin, the antibiotic is chemically modified so that it will no longer bind to the ribosome to block protein synthesis.
[0008] 3) An enzyme is produced that degrades the antibiotic, thereby inactivating it. For example, the penicillinases are a group of beta-lactamase enzymes that cleave the beta lactam ring of the penicillin molecule.

[0009] In addition, some pathogens show natural resistance against drugs. For example, an organism can lack a transport system for an antibiotic or the target of the antibiotic molecule is not present in the organism. In the case of Gram-negative bacteria, the cell wall is covered with an outer membrane that may establish a permeability barrier against the antibiotic.

[0010] Pathogens that are in principle susceptible to drugs can become resistant by modification of existing genetic material (e.g. spontaneous mutations for antibiotic resistance, happening in a frequency of one in about 100 mio bacteria in an infection) or the acquisition of new genetic material from another source. One example is horizontal gene transfer, a process where genetic material contained in small packets of DNA can be transferred between individual bacteria of the same species or even between different species. Horizontal gene transfer may happen by transduction, transformation or conjugation.

[0011] Generally, testing for susceptibility/resistance to antimicrobial agents is performed by culturing organisms in different concentration of these agents.

[0012] In brief, agar plates are inoculated with patient sample (e.g. urine, sputum, blood, stool) overnight. On the next day individual colonies are used for identification of organisms, either by culturing or using mass spectroscopy. Based on the identity of organisms new plates containing increasing concentration of drugs used for the treatment of these organisms are inoculated and grown for additional 12-24 hours. The lowest drug concentration which inhibits growth (minimal inhibitory concentration—MIC) is used to determine susceptibility/resistance for tested drugs. The process takes at least 2 to 3 working days during which the patient is treated empirically. A significant reduction of time-to-result is needed especially in patients with life-threatening disease and to overcome the widespread misuse of antibiotics.

[0013] Recent developments include PCR based test kits for fast bacterial identification (e.g. Biomerieux Biofire Tests, Curetis Unyvero Tests). With these test the detection of selected resistance loci is possible for a very limited number of drugs, but no correlation to culture based AST is given. Mass spectroscopy is increasingly used for identification of pathogens in clinical samples (e.g. Bruker Biotyper), and research is ongoing to establish methods for the detection of susceptibility/resistance against antibiotics.

[0014] For some drugs such it is known that at least two targets are addressed, e.g. in case of Ciprofloxacin (drug bank ID 00537; http://www.drugbank.ca/drugs/DB00537) targets include DNA Topoisomerase IV, DNA Topoisomerase II and DNA Gyrase. It can be expected that this is also the case for other drugs although the respective secondary targets have not been identified yet. In case of a common regulation, both relevant genetic sites would naturally show a co-correlation or redundancy.

[0015] It is known that drug resistance can be associated with genetic polymorphisms. This holds for viruses, where resistance testing is established clinical practice (e.g. HIV genotyping). More recently, it has been shown that resistance has also genetic causes in bacteria and even higher organisms, such as humans where tumors resistance against certain cytostatic agents can be linked to genomic mutations.

[0016] Wozniak et al. (BMC Genomics 2012, 13(Suppl 7):S23) disclose genetic determinants of drug resistance in Staphylococcus aureus based on genotype and phenotype data. Stoesser et al. disclose prediction of antimicrobial susceptibilities for Escherichia coli and Klebsiella pneumoniae isolates using whole genomic sequence data (J Antimicrob Chemother 2013; 68: 2234-2244).

[0017] Chewapreecha et al (Chewapreecha et al (2014) Comprehensive Identification of single nucleotid polymorphisms associated with beta-lactam resistance within pneumococcal mosaic genes. PLoS Genet 10(8): e1004547) used a comparable approach to identify mutations in gram-positive Streptococcus Pneumonia.

[0018] The fast and accurate detection of infections with Proteus species and the prediction of response to anti-microbial therapy represent a high unmet clinical need.

[0019] This need is addressed by the present invention.

### SUMMARY OF THE INVENTION

[0020] The present inventors addressed this need by carrying out whole genome sequencing of a large cohort of Proteus clinical isolates and comparing the genetic mutation profile to classical culture based antimicrobial susceptibility testing with the goal to develop a test which can be used to detect bacterial susceptibility/resistance against antimicrobial drugs using molecular testing.

[0021] The inventors performed extensive studies on the genome of bacteria of Proteus species either susceptible or resistant to antimicrobial, e.g. antibiotic, drugs. Based on this information, it is now possible to provide a detailed analysis on the resistance pattern of Proteus strains based on individual genes or mutations on a nucleotide level. This analysis involves the identification of a resistance against individual antimicrobial, e.g. antibiotic, drugs as well as clusters of them. This allows not only for the determination of a resistance to a single antimicrobial, e.g. antibiotic, drug, but also to groups of antimicrobial drugs, e.g. antibiotics such as lactam or quinolone antibiotics, or even to all relevant antibiotic drugs.

[0022] Therefore, the present invention will considerably facilitate the selection of an appropriate antimicrobial, e.g. antibiotic, drug for the treatment of a Proteus infection in a patient and thus will largely improve the quality of diagnosis and treatment.

[0023] According to a first aspect, the present invention discloses a diagnostic method of determining an infection of a patient with Proteus species potentially resistant to antimicrobial drug treatment, which can be also described as a method of determining an antimicrobial drug, e.g. antibiotic, resistant Proteus infection of a patient, comprising the steps of:

a) obtaining or providing a sample containing or suspected of containing at least one Proteus species from the patient;
b) determining the presence of at least one mutation in at least two genes from the group of genes listed in Table 1 or Table 2 below, wherein the presence of said at least two mutations is indicative of an infection with an antimicrobial drug resistant, e.g. antibiotic resistant, Proteus strain in said patient.

[0024] An infection of a patient with Proteus species potentially resistant to antimicrobial drug treatment herein means an infection of a patient with Proteus species wherein it is unclear if the Proteus species is susceptible to treatment with a specific antimicrobial drug or if it is resistant to the antimicrobial drug.

[0025] In step b) above, as well as corresponding steps, at least one mutation in at least two genes is determined, so that in total at least two mutations are determined, wherein the two mutations are in different genes.

TABLE 1
List of genes

| | | | | |
|---|---|---|---|---|
| parC | secG | cyoC | pykF | flhB |
| dedA | crr | murF | gmhB | purH |
| PMI2939 | fdoG | PMI3715 | gpmB | |

TABLE 2
List of genes

| | | | | |
|---|---|---|---|---|
| parC | secG | cyoC | pykF | flhB |
| dedA | crr | murF | gmhB | purH |
| PMI2939 | fdoG | PMI3715 | gpmB | |

[0026] According to a second aspect, the present invention relates to a method of selecting a treatment of a patient suffering from an infection with a potentially resistant Proteus stain, e.g. from an antimicrobial drug, e.g. antibiotic, resistant Proteus infection, comprising the steps of:

a) obtaining or providing a sample containing or suspected of containing at least one Proteus species from the patient;
b) determining the presence of at least one mutation in at least two genes from the group of genes listed in Table 1 or Table 2 above, wherein the presence of said at least two mutations is indicative of a resistance to one or more antimicrobial, e.g. antibiotic, drugs;
c) identifying said at least one or more antimicrobial, e.g. antibiotic, drugs; and
d) selecting one or more antimicrobial, e.g. antibiotic, drugs different from the ones identified in step c) and being suitable for the treatment of a Proteus infection.

[0027] A third aspect of the present invention relates to a method of determining an antimicrobial drug, e.g. antibiotic, resistance profile for bacterial microorganisms of Proteus species, comprising:

obtaining or providing a first data set of gene sequences of a plurality of clinical isolates of Proteus species;
providing a second data set of antimicrobial drug, e.g. antibiotic, resistance of the plurality of clinical isolates of Proteus species;
aligning the gene sequences of the first data set to at least one, preferably one, reference genome of Proteus, and/or assembling the gene sequence of the first data set, at least in part;
analyzing the gene sequences of the first data set for genetic variants to obtain a third data set of genetic variants; correlating the third data set with the second data set and statistically analyzing the correlation; and
determining the genetic sites in the genome of Proteus associated with antimicrobial drug, e.g. antibiotic, resistance.

[0028] In addition, the present invention relates in a fourth aspect to a method of determining an antimicrobial drug, e.g. antibiotic, resistance profile for a bacterial microorganism belonging to the species Proteus comprising the steps of

a) obtaining or providing a sample containing or suspected of containing the bacterial microorganism;
b) determining the presence of a mutation in at least one gene of the bacterial microorganism as determined by the method according to the third aspect of the present invention;
wherein the presence of a mutation is indicative of a resistance to an antimicrobial, e.g. antibiotic, drug.

[0029] Furthermore, the present invention discloses in a fifth aspect a diagnostic method of determining an infection of a patient with Proteus species potentially resistant to antimicrobial drug treatment, which can, like in the first aspect, also be described as method of determining an antimicrobial drug, e.g. antibiotic, resistant Proteus infection of a patient, comprising the steps of:

a) obtaining or providing a sample containing or suspected of containing a bacterial microorganism belonging to the species Proteus from the patient;
b) determining the presence of at least one mutation in at least one gene of the bacterial microorganism belonging to the species Proteus as determined by the method according to the third aspect of the present invention, wherein the presence of said at least one mutation is indicative of an antimicrobial drug, e.g. antibiotic, resistant Proteus infection in said patient.

[0030] Also disclosed is in a sixth aspect a method of selecting a treatment of a patient suffering from an infection with a potentially resistant Proteus strain, e.g. from an antimicrobial drug, e.g. antibiotic, resistant Proteus infection, comprising the steps of:

a) obtaining or providing a sample containing or suspected of containing a bacterial microorganism belonging to the species Proteus from the patient;
b) determining the presence of at least one mutation in at least one gene of the bacterial microorganism belonging to the species Proteus as determined by the method according to the third aspect of the present invention, wherein the presence of said at least one mutation is indicative of a resistance to one or more antimicrobial, e.g. antibiotic, drugs;
c) identifying said at least one or more antimicrobial, e.g. antibiotic, drugs; and
d) selecting one or more antimicrobial, e.g. antibiotic, drugs different from the ones identified in step c) and being suitable for the treatment of a Proteus infection.

[0031] A seventh aspect of the present invention relates to a method of acquiring, respectively determining, an antimicrobial drug, e.g. antibiotic, resistance profile for a bacterial microorganism of Proteus species, comprising:

obtaining or providing a first data set of gene sequences of a clinical isolate of Proteus species;
providing a second data set of antimicrobial drug, e.g. antibiotic, resistance of a plurality of clinical isolates of Proteus species;
aligning the gene sequences of the first data set to at least one, preferably one, reference genome of Proteus, and/or assembling the gene sequence of the first data set, at least in part;
analyzing the gene sequences of the first data set for genetic variants to obtain a third data set of genetic variants of the first data set;
correlating the third data set with the second data set and statistically analyzing the correlation; and
determining the genetic sites in the genome of Proteus of the first data set associated with antimicrobial drug, e.g. antibiotic, resistance.

[0032] According to an eighth aspect, the present invention discloses a computer program product comprising executable instructions which, when executed, perform a method according to the third, fourth, fifth, sixth or seventh aspect of the present invention.

[0033] Further aspects and embodiments of the invention are disclosed in the dependent claims and can be taken from the following description, figures and examples, without being limited thereto.

### FIGURES

[0034] The enclosed drawings should illustrate embodiments of the present invention and convey a further understanding thereof. In connection with the description they serve as explanation of concepts and principles of the invention. Other embodiments and many of the stated advantages can be derived in relation to the drawings. The elements of the drawings are not necessarily to scale towards each other. Identical, functionally equivalent and acting equal features and components are denoted in the figures of the drawings with the same reference numbers, unless noted otherwise.

[0035] FIG. 1 shows schematically a read-out concept for a diagnostic test according to a method of the present invention.

### DETAILED DESCRIPTION OF THE PRESENT INVENTION

### Definitions

[0036] Unless defined otherwise, technical and scientific terms used herein have the same meaning as commonly understood by one of ordinary skill in the art to which this invention belongs.

[0037] An “antimicrobial drug” in the present invention refers to a group of drugs that includes antibiotics, antifungals, antiprotozoals, and antivirals. According to certain embodiments, the antimicrobial drug is an antibiotic.

[0038] The term “nucleic acid molecule” refers to a polynucleotide molecule having a defined sequence. It comprises DNA molecules, RNA molecules, nucleotide analog molecules and combinations and derivatives thereof, such as DNA molecules or RNA molecules with incorporated nucleotide analogs or cDNA.

[0039] The term “nucleic acid sequence information” relates to information which can be derived from the sequence of a nucleic acid molecule, such as the sequence itself or a variation in the sequence as compared to a reference sequence.

[0040] The term “mutation” relates to a variation in the sequence as compared to a reference sequence. Such a reference sequence can be a sequence determined in a predominant wild type organism or a reference organism, e.g. a defined and known bacterial strain or substrain. A mutation is for example a deletion of one or multiple nucleotides, an insertion of one or multiple nucleotides, or substitution of one or multiple nucleotides, duplication of one or a sequence of multiple nucleotides, translocation of one or a sequence of multiple nucleotides, and, in particular, a single nucleotide polymorphism (SNP).

[0041] In the context of the present invention a “sample” is a sample which comprises at least one nucleic acid molecule from a bacterial microorganism. Examples for samples are: cells, tissue, body fluids, biopsy specimens, blood, urine, saliva, sputum, plasma, serum, cell culture supernatant, swab sample and others. According to certain embodiments, the sample is a patient sample (clinical isolate).

[0042] New and highly efficient methods of sequencing nucleic acids referred to as next generation sequencing have opened the possibility of large scale genomic analysis. The term “next generation sequencing” or “high throughput sequencing” refers to high-throughput sequencing technologies that parallelize the sequencing process, producing thousands or millions of sequences at once. Examples include Massively Parallel Signature Sequencing (MPSS), Polony sequencing, 454 pyrosequencing, Illumina (Solexa) sequencing, SOLiD sequencing, Ion semiconductor sequencing, DNA nanoball sequencing, Helioscope™ single molecule sequencing, Single Molecule SMRT™ sequencing, Single Molecule real time (RNAP) sequencing, Nanopore DNA sequencing, Sequencing By Hybridization, Amplicon Sequencing, GnuBio.

[0043] Within the present description the term “microorganism” comprises the term microbe. The type of microorganism is not particularly restricted, unless noted otherwise or obvious, and, for example, comprises bacteria, viruses, fungi, microscopic algae and protozoa, as well as combinations thereof. According to certain aspects, it refers to one or more Proteus species, particularly Proteus mirabilis, Proteus penneri and/or Proteus vulgaris.

[0044] A reference to a microorganism or microorganisms in the present description comprises a reference to one microorganism as well a plurality of microorganisms, e.g. two, three, four, five, six or more microorganisms.

[0045] A vertebrate within the present invention refers to animals having a vertebrae, which includes mammals—including humans, birds, reptiles, amphibians and fishes. The present invention thus is not only suitable for human medicine, but also for veterinary medicine.

[0046] According to certain embodiments, the patient in the present methods is a vertebrate, more preferably a mammal and most preferred a human patient.

[0047] Before the invention is described in exemplary detail, it is to be understood that this invention is not limited to the particular component parts of the process steps of the methods described herein as such methods may vary. It is also to be understood that the terminology used herein is for purposes of describing particular embodiments only, and is not intended to be limiting. It must be noted that, as used in the specification and the appended claims, the singular forms “a,” “an” and “the” include singular and/or plural referents unless the context clearly dictates otherwise. For example, the term “a” as used herein can be understood as one single entity or in the meaning of “one or more” entities. It is also to be understood that plural forms include singular and/or plural referents unless the context clearly dictates otherwise. It is moreover to be understood that, in case parameter ranges are given which are delimited by numeric values, the ranges are deemed to include these limitation values.

[0048] Regarding the dosage of the antimicrobial, e.g. antibiotic, drugs, it is referred to the established principles of pharmacology in human and veterinary medicine. For example, Forth, Henschler, Rummel “Allgemeine und spezielle Pharmakologie und Toxikologie”, 9^{th} edition, 2005, pp. 781-919, might be used as a guideline. Regarding the formulation of a ready-to-use medicament, reference is made to “Remington, The Science and Practice of Pharmacy”, 22^{nd} edition, 2013, pp. 777-1070.

[0049] Assembling of a gene sequence can be carried out by any known method and is not particularly limited.

[0050] According to certain embodiments, mutations that were found using alignments can also be compared or matched with alignment-free methods, e.g. for detecting single base exchanges, for example based on contigs that were found by assemblies. For example, reads obtained from sequencing can be assembled to contigs and the contigs can be compared to each other.

[0051] According to a first aspect, the present invention relates to a diagnostic method of determining an infection of a patient with Proteus species potentially resistant to antimicrobial drug treatment, which can also be described as method of determining an antimicrobial drug, e.g. antibiotic, resistant Proteus infection of a patient, comprising the steps of:

a) obtaining or providing a sample containing or suspected of containing at least one Proteus species from the patient;
b) determining the presence of at least one mutation in at least two genes from the group of genes consisting of parC, secG, cyoC, pykF, flhB, dedA, crr, murF, gmhB, purH, PMI2939, fdoG, PMI3715, and gpmB, preferably secG, cyoC, pykF, flhB, dedA, crr, murF, gmhB, purH, PMI2939, fdoG, PMI3715, and gpmB, wherein the presence of said at least two mutations is indicative of an infection with an antimicrobial, e.g. antibiotic, resistant Proteus strain in said patient.

[0052] In this method, as well as the other methods of the invention, the sample can be provided or obtained in any way, preferably non-invasive, and can be e.g. provided as an in vitro sample or prepared as in vitro sample.

[0053] According to certain aspects, mutations in at least two, three, four, five, six, seven, eight, nine or ten genes are determined in any of the methods of the present invention, e.g. in at least two genes or in at least three genes. Instead of testing only single genes or mutants, a combination of several variant positions can improve the prediction accuracy and further reduce false positive findings that are influenced by other factors. Therefore, it is in particular preferred to determine the presence of a mutation in 2, 3, 4, 5, 6, 7, 8 or 9 (or more) genes selected from Table 1 or 2.

[0054] For the above genes, i.e. the genes also denoted in Tables 1 and 2, the highest probability of a resistance to at least one antimicrobial drug, e.g. antibiotic, could be observed, with p-values smaller than 10⁻³⁰, particularly smaller than 10⁻⁴⁰, further particularly smaller than 10⁻⁶⁰, indicating the high significance of the values (n=583; α=0.05). Details regarding Tables 1 and 2 can be taken from Tables 3 and 4 (4a, 4b, 4c) disclosed in the Examples. Having at least two genes with mutations determined, a high probability of an antimicrobial drug, e.g. antibiotic, resistance could be determined. The genes in Table 1 thereby represent the best genes for which a mutation was observed in the genomes of Proteus species, whereas the genes in Table 2 represent the best genes for which a cross-correlation could be observed for the antimicrobial drug, e.g. antibiotic, susceptibility testing for Proteus species as described below.

[0055] According to certain embodiments, the obtaining or providing a sample containing or suspected of containing at least one Proteus species from the patient in this method—as well as the other methods of the invention—can comprise the following:

[0056] A sample of a vertebrate, e.g. a human, e.g. is provided or obtained and nucleic acid sequences, e.g. DNA or RNA sequences, are recorded by a known method for recording nucleic acid, which is not particularly limited. For example, nucleic acid can be recorded by a sequencing method, wherein any sequencing method is appropriate, particularly sequencing methods wherein a multitude of sample components, as e.g. in a blood sample, can be analyzed for nucleic acids and/or nucleic acid fragments and/or parts thereof contained therein in a short period of time, including the nucleic acids and/or nucleic acid fragments and/or parts thereof of at least one microorganism of interest, particularly of at least one Proteus species. For example, sequencing can be carried out using polymerase chain reaction (PCR), particularly multiplex PCR, or high throughput sequencing or next generation sequencing, preferably using high-throughput sequencing. For sequencing, preferably an in vitro sample is used.

[0057] The data obtained by the sequencing can be in any format, and can then be used to identify the nucleic acids, and thus genes, of the microorganism, e.g. of Proteus species, to be identified, by known methods, e.g. fingerprinting methods, comparing genomes and/or aligning to at least one, or more, genomes of one or more species of the microorganism of interest, i.e. a reference genome, etc., forming a third data set of aligned genes for a Proteus species—discarding additional data from other sources, e.g. the vertebrate. Reference genomes are not particularly limited and can be taken from several databases. Depending on the microorganism, different reference genomes or more than one reference genomes can be used for aligning. Using the reference genome—as well as also the data from the genomes of the other species, e.g. Proteus species—mutations in the genes for each species and for the whole multitude of samples of different species, e.g. Proteus species, can be obtained.

[0058] For example, it is useful in genome-wide association studies to reference the points of interest, e.g. mutations, to one constant reference for enhanced standardization. In case of the human with a high consistency of the genome and 99% identical sequences among individuals this is easy and represents the standard, as corresponding reference genomes are available in databases. In case of organisms that trigger infectious diseases (e.g. bacteria and viruses) this is much more difficult, though. One possibility is to fall back on a virtual pan genome which contains all sequences of a certain genus. A further possibility is the analysis of all available references, which is much more complex. Therein all n references from a database (e.g. RefSeq) are extracted and compared with the newly sequenced bacterial genomes k. After this, matrices (% of mapped reads, % of covered genome) are applied to estimate which reference is best suited to all new bacteria. However, n×k complete alignments are carried out. Having a big number of references, though, stable results can be obtained, as is the case for Proteus.

[0059] According to certain embodiments, the genomes of Proteus species are referenced to one reference genome. However, it is not excluded that for other microorganisms more than one reference genome is used. In the present methods, the reference genome of Proteus is NC 010554 as annotated at the NCBI according to certain embodiments. The reference genome is attached to this application as sequence listing with SEQ ID NO 1.

[0060] The reference sequence was obtained from Proteus strain NC_010554 (http://www.genome.jp/dbget-bin/www_bget?refseq+NC_010554)

[0061] LOCUS NC_010554 4063606 bp DNA circular CON 7 Feb. 2015

| | |
|---|---|
| DEFINITION | Proteus mirabilis strain HI4320, complete genome. |
| ACCESSION | NC_010554 |
| VERSION | NC_010554.1 GI:197283915 |
| DBLINK | BioProject: PRJNA224116 |
| | Assembly: GCF_000069965.1 |
| KEYWORDS | RefSeq; complete genome. |
| SOURCE | Proteus mirabilis HI4320 |
| ORGANISM | Proteus mirabilis HI4320 |
| | Bacteria; Proteobacteria; Gammaproteobacteria; |
| | Enterobacteriales; Enterobacteriaceae; Proteus. |

### Reference 1

[0062] AUTHORS Pearson, M. M., Sebaihia, M., Churcher, C., Quail, M. A., Seshasayee, A. S., Luscombe, N. M., Abdellah, Z., Arrosmith, C., Atkin, B., Chillingworth, T., Hauser, H., Jagels, K., Moule, S., Mungall, K., Norbertczak, H., Rabbinowitsch, E., Walker, D., Whithead, S., Thomson, N. R., Rather, P. N., Parkhill, J. and Mobley, H. L.

| | |
|---|---|
| TITLE | Complete genome sequence of uropathogenic Proteus |
| | mirabilis, a master of both adherence and motility |
| JOURNAL | J. Bacteriol. 190 (11), 4027-4037 (2008) |
| PUBMED | 18375554 |
| REFERENCE | 2 (bases 1 to 4063606) |
| AUTHORS | Sebaihia, M. |
| TITLE | Direct Submission |
| JOURNAL | Submitted (18-FEB-2008) Sebaihia M., Sulston |
| | Laboratories, Wellcome Trust Sanger Institute, Wellcome |
| | Trust Genome Campus, Hinxton, Cambridge, |
| | CB10 1SA, UNITED KINGDOM |

[0063] Alternatively or in addition, the gene sequence of the first data set can be assembled, at least in part, with known methods, e.g. by de-novo assembly or mapping assembly. The sequence assembly is not particularly limited, and any known genome assembler can be used, e.g. based on Sanger, 454, Solexa, Illumina, SOLid technologies, etc., as well as hybrids/mixtures thereof.

[0064] According to certain embodiments, the data of nucleic acids of different origin than the microorganism of interest, e.g. Proteus species, can be removed after the nucleic acids of interest are identified, e.g. by filtering the data out. Such data can e.g. include nucleic acids of the patient, e.g. the vertebrate, e.g. human, and/or other microorganisms, etc. This can be done by e.g. computational subtraction, as developed by Meyerson et al. 2002. For this, also aligning to the genome of the vertebrate, etc., is possible. For aligning, several alignment-tools are available. This way the original data amount from the sample can be drastically reduced.

[0065] Also after such removal of “excess” data, fingerprinting and/or aligning, and/or assembly, etc. can be carried out, as described above, forming a third data set of aligned or assembled genes for a Proteus species.

[0066] Using these techniques, genes with mutations of the microorganism of interest, e.g. Proteus species, can be obtained for various species.

[0067] When testing these same species for antimicrobial drug, e.g. antibiotic, susceptibility of a number of antimicrobial drugs, e.g. antibiotics, e.g. using standard culturing methods on dishes with antimicrobial drug, e.g. antibiotic, intake, as e.g. described below, the results of these antimicrobial drug, e.g. antibiotic, susceptibility tests can then be cross-referenced/correlated with the mutations in the genome of the respective microorganism, e.g. Proteus. Using several, e.g. 50 or more than 50, 100 or more than 100, 200 or more than 200, 300 or more than 300, 400 or more than 400, or 450 or more than 450 different species of a microorganism, e.g. different Proteus species, statistical analysis can be carried out on the obtained cross-referenced data between mutations and antimicrobial drug, e.g. antibiotic, susceptibility for these number of species, using known methods.

[0068] Regarding culturing methods, samples can be e.g. cultured overnight. On the next day individual colonies can be used for identification of organisms, either by culturing or using mass spectroscopy. Based on the identity of organisms new plates containing increasing concentration of antibiotics used for the treatment of these organisms are inoculated and grown for additional 12-24 hours. The lowest drug concentration which inhibits growth (minimal inhibitory concentration—MIC) can be used to determine susceptibility/resistance for tested antibiotics.

[0069] Correlation of the nucleic acid/gene mutations with antimicrobial drug, e.g. antibiotic, resistance can be carried out in a usual way and is not particularly limited. For example, resistances can be correlated to certain genes or certain mutations, e.g. SNPs, in genes. After correlation, statistical analysis can be carried out.

[0070] In addition, statistical analysis of the correlation of the gene mutations with antimicrobial drug, e.g. antibiotic, resistance is not particularly limited and can be carried out, depending on e.g. the amount of data, in different ways, for example using analysis of variance (ANOVA) or Student's t-test, for example with a sample size n of 50 or more, 100 or more, 200 or more, 300 or more, 400 or more or 450 or more, and a level of significance (a-error-level) of e.g. 0.05 or smaller, e.g. 0.05, preferably 0.01 or smaller. A statistical value can be obtained for each gene and/or each position in the genome as well as for all antibiotics tested, a group of antibiotics or a single antibiotic. The obtained p-values can also be adapted for statistical errors, if needed.

[0071] For statistically sound results a multitude of individuals should be sampled, with n=50, 100, 200, 300, 400, 500 or 550, and a level of significance (a-error-level) of e.g. 0.05 or smaller, e.g. 0.05, preferably 0.01 or smaller. According to certain embodiments, particularly significant results can be obtained for n=200, 300, 400, 500 or 550.

[0072] According to certain embodiments, a multitude of individuals can be sampled, with n=50 or more, 100 or more, 200 or more, 300 or more, 400 or more, 500 or more or 550 or more, and a level of significance (a-error-level) of e.g. 0.05 or smaller, e.g. 0.05, preferably 0.01 or smaller. According to certain embodiments, particularly significant results can be obtained for n=200 or more, 300 or more, 400 or more, 500 or more or 550 or more.

[0073] After the above procedure has been carried out for more than 550, e.g. 583, individual species of Proteus, the data disclosed in Tables 1 and 2 were obtained for the statistically best correlations between gene mutations and antimicrobial drug, e.g. antibiotic, resistances. Thus, mutations in these genes were proven as valid markers for antimicrobial drug, e.g. antibiotic, resistance.

[0074] According to a further aspect, the present invention relates in a second aspect to a method of selecting a treatment of a patient suffering from an infection with a potentially resistant Proteus stain, e.g. from an antimicrobial drug, e.g.

[0075] antibiotic, resistant Proteus infection, comprising the steps of:

a) obtaining or providing a sample containing or suspected of containing at least one Proteus species from the patient;
b) determining the presence of at least one mutation in at least two genes from the group of genes consisting of parC, secG, cyoC, pykF, flhB, dedA, crr, murF, gmhB, purH, PMI2939, fdoG, PMI3715, and gpmB, preferably secG, cyoC, pykF, flhB, dedA, crr, murF, gmhB, purH, PMI2939, fdoG, PMI3715, and gpmB, wherein the presence of said at least two mutations is indicative of a resistance to one or more antimicrobial, e.g. antibiotic, drugs;
c) identifying said at least one or more antimicrobial, e.g. antibiotic, drugs; and
d) selecting one or more antimicrobial, e.g. antibiotic, drugs different from the ones identified in step c) and being suitable for the treatment of a Proteus infection.

[0076] In this method, the steps a) of obtaining or providing a sample and b) of determining the presence of at least one mutation are as in the method of the first aspect.

[0077] The identification of the at least one or more antimicrobial, e.g. antibiotic, drug in step c) is then based on the results obtained in step b) and corresponds to the antimicrobial, e.g. antibiotic, drug(s) that correlate(s) with the mutations. Once these antimicrobial drugs, e.g. antibiotics, are ruled out, the remaining antimicrobial drugs, e.g. antibiotic drugs/antibiotics, can be selected in step d) as being suitable for treatment.

[0078] In the description, references to the first and second aspect also apply to the 14^{th}, 15^{th}, 16^{th} and 17^{th} aspect, referring to the same genes, unless clear from the context that they don't apply.

[0079] According to certain embodiments in the method of the first or second aspect, at least a mutation in parC, particularly in position 2562578 with regard to reference genome NC_010554 as annotated at the NCBI, is determined. For such mutation, a particularly relevant correlation with antimicrobial drug, e.g. antibiotic, resistance could be determined. In particular, the mutation in position 2562578 with regard to reference genome NC_010554 as annotated at the NCBI is a nonsynonymous coding, particularly a codon change aGc/aTc.

[0080] According to certain embodiments, the antimicrobial drug, e.g. antibiotic, in the method of the first or second aspect, as well as in the other methods of the invention, is at least one selected from the group of β-lactams, β-lactam inhibitors, quinolines and derivatives thereof, aminoglycosides, polyketides, respectively tetracyclines, and folate synthesis inhibitors.

[0081] In the methods of the invention the resistance of Proteus to one or more antimicrobial, e.g. antibiotic, drugs can be determined according to certain embodiments.

[0082] According to certain embodiments of the first and/or second aspect of the invention the antimicrobial, e.g. antibiotic, drug is selected from lactam antibiotics and the presence of a mutation in the following genes is determined: parC, secG, cyoC, pykF, flhB, dedA, crr, murF, gmhB, purH, PMI2939, fdoG, PMI3715, and/or gpmB, preferably secG, cyoC, pykF, flhB, dedA, crr, murF, gmhB, purH, PMI2939, fdoG, PMI3715, and/or gpmB.

[0083] According to certain embodiments of the first and/or second aspect of the invention the antimicrobial, e.g. antibiotic, drug is selected from quinolone antibiotics, preferably fluoroquinolone antibiotics, and the presence of a mutation in the following genes is determined: parC, secG, cyoC, pykF, flhB, dedA, crr, murF, gmhB, purH, PMI2939, fdoG, PMI3715, and/or gpmB, preferably secG, cyoC, pykF, flhB, dedA, crr, murF, gmhB, purH, PMI2939, fdoG, PMI3715, and/or gpmB.

[0084] According to certain embodiments of the first and/or second aspect of the invention the antimicrobial, e.g. antibiotic, drug is selected from aminoglycoside antibiotics, and the presence of a mutation in the following genes is determined: parC.

[0085] According to certain embodiments of the first and/or second aspect of the invention the antimicrobial, e.g. antibiotic, drug is selected from polyketide antibiotics, preferably tetracycline antibiotics, and the presence of a mutation in the following genes is determined: secG, cyoC, pykF, flhB, dedA, crr, murF, gmhB, purH, PMI2939, fdoG, PMI3715, and/or gpmB.

[0086] According to certain embodiments of the first and/or second aspect of the invention the antimicrobial, e.g. antibiotic, drug is selected from benzene derived/sulfonamide antibiotics, and the presence of a mutation in the following genes is determined: parC and/or fdoG, preferably fdoG.

[0087] According to certain embodiments, the antimicrobial drug is an antibiotic/antibiotic drug.

[0088] According to certain embodiments of the first and/or second aspect of the invention, determining the nucleic acid sequence information or the presence of a mutation comprises determining the presence of a single nucleotide at a single position in a gene. Thus the invention comprises methods wherein the presence of a single nucleotide polymorphism or mutation at a single nucleotide position is detected.

[0089] According to certain embodiments, the antibiotic drug in the methods of the present invention is selected from the group consisting of Amoxicillin/K Clavulanate (AUG), Ampicillin (AM), Aztreonam (AZT), Cefazolin (CFZ), Cefepime (CPE), Cefotaxime (CFT), Ceftazidime (CAZ), Ceftriaxone (CAX), Cefuroxime (CRM), Cephalotin (CF), Ciprofloxacin (CP), Ertapenem (ETP), Gentamicin (GM), Imipenem (IMP), Levofloxacin (LVX), Meropenem (MER), Piperacillin/Tazobactam (P/T), Ampicillin/Sulbactam (A/S), Tetracycline (TE), Tobramycin (TO), and Trimethoprim/Sulfamethoxazole (T/S).

[0090] The inventors have surprisingly found that mutations in certain genes are indicative not only for a resistance to one single antimicrobial, e.g. antibiotic, drug, but to groups containing several drugs.

[0091] According to certain embodiments of the first and/or second aspect of the invention, the gene is from Table 1 or Table 2, the antibiotic drug is selected from lactam antibiotics and a mutation in at least one of the following genes is detected with regard to reference genome NC_010554: parC, secG, cyoC, pykF, flhB, dedA, crr, murF, gmhB, purH, PMI2939, fdoG, PMI3715, and/or gpmB, preferably secG, cyoC, pykF, flhB, dedA, crr, murF, gmhB, purH, PMI2939, fdoG, PMI3715, and/or gpmB.

[0092] According to certain embodiments of the first and/or second aspect of the invention, the gene is from Table 1 or Table 2, the antibiotic drug is selected from quinolone antibiotics, preferably fluoroquinolone antibiotics, and a mutation in at least one of the following genes is detected with regard to reference genome NC_010554: parC, secG, cyoC, pykF, flhB, dedA, crr, murF, gmhB, purH, PMI2939, fdoG, PMI3715, and/or gpmB, preferably secG, cyoC, pykF, flhB, dedA, crr, murF, gmhB, purH, PMI2939, fdoG, PMI3715, and/or gpmB.

[0093] According to certain embodiments of the first and/or second aspect of the invention, the gene is from Table 1 or Table 2, the antibiotic drug is selected from aminoglycoside antibiotics and a mutation in at least one of the following genes is detected with regard to reference genome NC_010554: parC.

[0094] According to certain embodiments of the first and/or second aspect of the invention, the gene is from Table 1 or Table 2, the antibiotic drug is selected from polyketide antibiotics, preferably tetracycline antibiotics, and a mutation in at least one of the following genes is detected with regard to reference genome NC_010554: secG, cyoC, pykF, flhB, dedA, crr, murF, gmhB, purH, PMI2939, fdoG, PMI3715, and/or gpmB.

[0095] According to certain embodiments of the first and/or second aspect of the invention, the gene is from Table 1 or Table 2, the antibiotic drug is selected from benzene derived/sulfonamide antibiotics and a mutation in at least one of the following genes is detected with regard to reference genome NC_010554: parC and/or fdoG, preferably fdoG.

[0096] For specific antimicrobial drugs, e.g. antibiotics, specific positions in the above genes can be determined where a high statistical significance is observed. The inventors found that, apart from the above genes indicative of a resistance against antibiotics, also single nucleotide polymorphisms (=SNP's) may have a high significance for the presence of a resistance against defined antibiotic drugs. The analysis of these polymorphisms on a nucleotide level may further improve and accelerate the determination of a drug resistance to antimicrobial drugs, e.g. antibiotics, in Proteus.

[0097] According to certain embodiments of the first and/or second aspect of the invention, the gene is from Table 1 or Table 2, the antibiotic drug is selected from lactam antibiotics and a mutation in at least one of the following nucleotide positions is detected with regard to reference genome NC_010554: 2562578, 3741905, 131826, 1482764, 1771087, 1771119, 1918241, 1968294, 2238063, 2238072, 2238088, 2238090, 2454709, 3039125, 3221491, 3221494, 3422635, 4059624, 4059634, 4060202, 131835, preferably 3741905, 131826, 1482764, 1771087, 1771119, 1918241, 1968294, 2238063, 2238072, 2238088, 2238090, 2454709, 3039125, 3221491, 3221494, 3422635, 4059624, 4059634, 4060202, 131835.

[0098] According to certain embodiments of the first and/or second aspect of the invention, the gene is from Table 1 or Table 2, the antibiotic drug is selected from quinolone antibiotics, preferably fluoroquinolone antibiotics, and a mutation in at least one of the following nucleotide positions is detected with regard to reference genome NC_010554: 2562578, 3741905, 131826, 1482764, 1771087, 1771119, 1918241, 1968294, 2238063, 2238072, 2238088, 2238090, 2454709, 3039125, 3221491, 3221494, 3422635, 4059624, 4059634, 4060202, 131835, pref3741905, 131826, 1482764, 1771087, 1771119, 1918241, 1968294, 2238063, 2238072, 2238088, 2238090, 2454709, 3039125, 3221491, 3221494, 3422635, 4059624, 4059634, 4060202, 131835erably.

[0099] According to certain embodiments of the first and/or second aspect of the invention, the gene is from Table 1 or Table 2, the antibiotic drug is selected from aminoglycoside antibiotics and a mutation in at least one of the following nucleotide positions is detected with regard to reference genome NC_010554: 2562578.

[0100] According to certain embodiments of the first and/or second aspect of the invention, the gene is from Table 1 or Table 2, the antibiotic drug is selected from polyketide antibiotics, preferably tetracycline antibiotics, and a mutation in at least one of the following nucleotide positions is detected with regard to reference genome NC_010554: 3741905, 131826, 1482764, 1771087, 1771119, 1918241, 1968294, 2238063, 2238072, 2238088, 2238090, 2454709, 3039125, 3221491, 3221494, 3422635, 4059624, 4059634, 4060202, 131835.

[0101] According to certain embodiments of the first and/or second aspect of the invention, the gene is from Table 1 or Table 2, the antibiotic drug is selected from benzene derived/sulfonamide antibiotics and a mutation in at least one of the following nucleotide positions is detected with regard to reference genome NC_010554: 2562578, 3422635, preferably 3422635.

[0102] According to certain embodiments of the first and/or second aspect of the invention, the antibiotic drug is at least one of CF, CFZ, CRM, CP, CAX, AM, A/S, LVX and AUG, and a mutation in at least one of the following nucleotide positions is detected with regard to reference genome NC_010554: 2562578, 3741905, 131826, 1482764, 1771087, 1771119, 1918241, 1968294, 2238063, 2238072, 2238088, 2238090, 2454709, 3039125, 3221491, 3221494, 3422635, 4059624, 4059634, 4060202, 131835, preferably 3741905, 131826, 1482764, 1771087, 1771119, 1918241, 1968294, 2238063, 2238072, 2238088, 2238090, 2454709, 3039125, 3221491, 3221494, 3422635, 4059624, 4059634, 4060202, 131835.

[0103] According to certain embodiments of the first and/or second aspect of the invention, the antibiotic drug is TE and a mutation in at least one of the following nucleotide positions is detected with regard to reference genome NC_010554: 3741905, 131826, 1482764, 1771087, 1771119, 1918241, 1968294, 2238063, 2238072, 2238088, 2238090, 2454709, 3039125, 3221491, 3221494, 3422635, 4059624, 4059634, 4060202, 131835.

[0104] According to certain embodiments of the first and/or second aspect of the invention, the antibiotic drug is CFT and a mutation in at least one of the following nucleotide positions is detected with regard to reference genome NC_010554: 2562578, 3741905, 131826, 1482764, 1771087, 1771119, 1918241, 1968294, 2238063, 2238072, 2238088, 2238090, 3221491, 3221494, 4059624, 4059634, 4060202, 131835, preferably 3741905, 131826, 1482764, 1771087, 1771119, 1918241, 1968294, 2238063, 2238072, 2238088, 2238090, 3221491, 3221494, 4059624, 4059634, 4060202, 131835.

[0105] According to certain embodiments of the first and/or second aspect of the invention, the antibiotic drug is T/S and a mutation in at least one of the following nucleotide positions is detected with regard to reference genome NC_010554: 2562578, 3422635, preferably 3422635.

[0106] According to certain embodiments of the first and/or second aspect of the invention, the antibiotic drug is at least one of GM and CPE and a mutation in at least one of the following nucleotide positions is detected with regard to reference genome NC_010554: 2562578.

[0107] According to certain embodiments of the first and/or second aspect of the invention, the resistance of a bacterial microorganism belonging to the species Proteus against 1, 2, 3, 4, 5, 6, 7, 8, 9, 10, 11, 12, 13, 14, 15 or 16, 17, 18, 19, 20 or 21 antibiotic drugs is determined.

[0108] According to certain embodiments of the first and/or second aspect of the invention, a detected mutation is a mutation leading to an altered amino acid sequence in a polypeptide derived from a respective gene in which the detected mutation is located. According to this aspect, the detected mutation thus leads to a truncated version of the polypeptide (wherein a new stop codon is created by the mutation) or a mutated version of the polypeptide having an amino acid exchange at the respective position.

[0109] According to certain embodiments of the first and/or second aspect of the invention, determining the nucleic acid sequence information or the presence of a mutation comprises determining a partial sequence or an entire sequence of the at least two genes.

[0110] According to certain embodiments of the first and/or second aspect of the invention, determining the nucleic acid sequence information or the presence of a mutation comprises determining a partial or entire sequence of the genome of the Proteus species, wherein said partial or entire sequence of the genome comprises at least a partial sequence of said at least two genes.

[0111] According to certain embodiments of the first and/or second aspect of the invention, determining the nucleic acid sequence information or the presence of a mutation comprises using a next generation sequencing or high throughput sequencing method. According to preferred embodiments of the first and/or second aspect of the invention, a partial or entire genome sequence of the bacterial organism of Proteus species is determined by using a next generation sequencing or high throughput sequencing method.

[0112] In a further, third aspect, the present invention relates to a method of determining an antimicrobial drug, e.g. antibiotic, resistance profile for bacterial microorganisms of Proteus species, comprising:

obtaining or providing a first data set of gene sequences of a plurality of clinical isolates of Proteus species;
providing a second data set of antimicrobial drug, e.g. antibiotic, resistance of the plurality of clinical isolates of Proteus species;
aligning the gene sequences of the first data set to at least one, preferably one, reference genome of Proteus, and/or assembling the gene sequence of the first data set, at least in part;
analyzing the gene sequences of the first data set for genetic variants to obtain a third data set of genetic variants; correlating the third data set with the second data set and statistically analyzing the correlation; and determining the genetic sites in the genome of Proteus associated with antimicrobial drug, e.g. antibiotic, resistance.

[0113] The different steps can be carried out as described with regard to the method of the first aspect of the present invention.

[0114] When referring to the second data set, wherein the second data set e.g. comprises, respectively is, a set of antimicrobial drug, e.g. antibiotic, resistances of a plurality of clinical isolates, this can, within the scope of the invention, also refer to a self-learning data base that, whenever a new sample is analyzed, can take this sample into the second data set and thus expand its data base. The second data set thus does not have to be static and can be expanded, either by external input or by incorporating new data due to self-learning. This is, however, not restricted to the third aspect of the invention, but applies to other aspects of the invention that refer to a second data set, which does not necessarily have to refer to antimicrobial drug resistance. The same applies, where applicable, to the first data set, e.g. in the third aspect.

[0115] According to certain embodiments, statistical analysis in the present methods is carried out using Fisher's test with p<10⁻⁶, preferably p<10⁻⁹, particularly p<10⁻¹⁰.

[0116] The method of the third aspect of the present invention, as well as related methods, e.g. according to the 7^{th} and 10^{th} aspect, can, according to certain embodiments, comprise correlating different genetic sites to each other, e.g. in at least two, three, four, five, six, seven, eight, nine or ten genes. This way even higher statistical significance can be achieved.

[0117] According to certain embodiments of the method of the third aspect and related methods—as above, the second data set is provided by culturing the clinical isolates of Proteus species on agar plates provided with antimicrobial drugs, e.g. antibiotics, at different concentrations and the second data is obtained by taking the minimal concentration of the plates that inhibits growth of the respective Proteus species.

[0118] According to certain embodiments of the method of the third aspect and related methods, the antibiotic is at least one selected from the group of β-lactams, β-lactam inhibitors, quinolines and derivatives thereof, aminoglycosides, tetracyclines, and folate synthesis inhibitors, preferably Amoxicillin/K Clavulanate, Ampicillin, Aztreonam, Cefazolin, Cefepime, Cefotaxime, Ceftazidime, Ceftriaxone, Cefuroxime, Cephalothin, Ciprofloxacin, Ertapenem, Gentamicin, Imipenem, Levofloxacin, Meropenem, Piperacillin/Tazobactam, Ampicillin/Sulbactam, Tetracycline, Tobramycin, and Trimethoprim/Sulfamethoxazole.

[0119] According to certain embodiments of the method of the third aspect and related methods, the gene sequences in the third data set are comprised in at least one gene from the group of genes consisting of parC, secG, cyoC, pykF, flhB, dedA, crr, murF, gmhB, purH, PMI2939, fdoG, PMI3715, gpmB, preferably secG, cyoC, pykF, flhB, dedA, crr, murF, gmhB, purH, PMI2939, fdoG, PMI3715, gpmB, or from the genes listed in Table 5, preferably Table 5a.

[0120] According to certain embodiments of the method of the third aspect and related methods, the genetic variant has a point mutation, an insertion and or deletion of up to four bases, and/or a frameshift mutation, particularly a non-synonimous coding in YP_002152062.1.

[0121] A fourth aspect of the present invention relates to a method of determining an antimicrobial drug, e.g. antibiotic, resistance profile for a bacterial microorganism belonging to the species Proteus comprising the steps of

a) obtaining or providing a sample containing or suspected of containing the bacterial microorganism;
b) determining the presence of a mutation in at least one gene of the bacterial microorganism as determined by the method of the third aspect of the invention;
wherein the presence of a mutation is indicative of a resistance to an antimicrobial drug, e.g. antibiotic, drug.

[0122] Steps a) and b) can herein be carried out as described with regard to the first aspect, as well as for the following aspects of the invention.

[0123] With this method, any mutations in the genome of Proteus species correlated with antimicrobial drug, e.g. antibiotic, resistance can be determined and a thorough antimicrobial drug, e.g. antibiotic, resistance profile can be established.

[0124] A simple read out concept for a diagnostic test as described in this aspect is shown schematically in FIG. 1.

[0125] According to FIG. 1, a sample 1, e.g. blood from a patient, is used for molecular testing 2, e.g. using next generation sequencing (NGS), and then a molecular fingerprint 3 is taken, e.g. in case of NGS a sequence of selected genomic/plasmid regions or the whole genome is assembled. This is then compared to a reference library 4, i.e. selected sequences or the whole sequence are/is compared to one or more reference sequences, and mutations (SNPs, sequence-gene additions/deletions, etc.) are correlated with susceptibility/reference profile of reference strains in the reference library. The reference library 4 herein contains many genomes and is different from a reference genome. Then the result 5 is reported comprising ID (pathogen identification), i.e. a list of all (pathogenic) species identified in the sample, and AST (antimicrobial susceptibility testing), i.e. a list including a susceptibility/resistance profile for all species listed

[0126] A fifth aspect of the present invention relates to a diagnostic method of determining an infection of a patient with Proteus species potentially resistant to antimicrobial drug treatment, which also can be described as method of determining an antimicrobial drug, e.g. antibiotic, resistant Proteus infection in a patient, comprising the steps of:

a) obtaining or providing a sample containing or suspected of containing a bacterial microorganism belonging to the species Proteus from the patient;
b) determining the presence of at least one mutation in at least one gene of the bacterial microorganism belonging to the species Proteus as determined by the method of the third aspect of the present invention, wherein the presence of said at least one mutation is indicative of an antimicrobial drug, e.g. antibiotic, resistant Proteus infection in said patient.

[0127] Again, steps a) and b) can herein be carried out as described with regard to the first aspect of the present invention.

[0128] According to this aspect, a Proteus infection in a patient can be determined using sequencing methods as well as a resistance to antimicrobial drugs, e.g. antibiotics, of the Proteus species be determined in a short amount of time compared to the conventional methods.

[0129] In a sixth aspect the present invention relates to a method of selecting a treatment of a patient suffering from an infection with a potentially resistant Proteus strain, e.g. an antimicrobial drug, e.g. antibiotic, resistant Proteus infection, comprising the steps of:

a) obtaining or providing a sample containing or suspected of containing a bacterial microorganism belonging to the species Proteus from the patient;
b) determining the presence of at least one mutation in at least one gene of the bacterial microorganism belonging to the species Proteus as determined by the method of the third aspect of the invention, wherein the presence of said at least one mutation is indicative of a resistance to one or more antimicrobial, e.g. antibiotic, drugs;
c) identifying said at least one or more antimicrobial, e.g. antibiotic, drugs; and
d) selecting one or more antimicrobial, e.g. antibiotic, drugs different from the ones identified in step c) and being suitable for the treatment of a Proteus infection.

[0130] This method can be carried out similarly to the second aspect of the invention and enables a fast was to select a suitable treatment with antibiotics for any infection with an unknown Proteus species.

[0131] A seventh aspect of the present invention relates to a method of acquiring, respectively determining, an antimicrobial drug, e.g. antibiotic, resistance profile for a bacterial microorganism of Proteus species, comprising:

obtaining or providing a first data set of gene sequences of a clinical isolate of Proteus species;
providing a second data set of antimicrobial drug, e.g. antibiotic, resistance of a plurality of clinical isolates of Proteus species;
aligning the gene sequences of the first data set to at least one, preferably one, reference genome of Proteus, and/or assembling the gene sequence of the first data set, at least in part;
analyzing the gene sequences of the first data set for genetic variants to obtain a third data set of genetic variants of the first data set;
correlating the third data set with the second data set and statistically analyzing the correlation; and
determining the genetic sites in the genome of Proteus of the first data set associated with antimicrobial drug, e.g. antibiotic, resistance.

[0132] With this method, antimicrobial drug, e.g. antibiotic, resistances in an unknown isolate of Proteus can be determined.

[0133] According to certain embodiments, the reference genome of Proteus is NC_010554 as annotated at the NCBI. According to certain embodiments, statistical analysis in the present methods is carried out using Fisher's test with p<10⁻⁶, preferably p<10⁻⁹, particularly p<10⁻¹⁰. Also, according to certain embodiments, the method further comprises correlating different genetic sites to each other, e.g. in at least two, three, four, five, six, seven, eight, nine or ten genes.

[0134] An eighth aspect of the present invention relates to a computer program product comprising computer executable instructions which, when executed, perform a method according to the third, fourth, fifth, sixth or seventh aspect of the present invention.

[0135] In certain embodiments the computer program product is one on which program commands or program codes of a computer program for executing said method are stored. According to certain embodiments the computer program product is a storage medium. The same applies to the computer program products of the aspects mentioned afterwards, i.e. the eleventh aspect of the present invention. As noted above, the computer program products of the present invention can be self-learning, e.g. with respect to the first and second data sets.

[0136] In order to obtain the best possible information from the highly complex genetic data and develop an optimum model for diagnostic and therapeutical uses as well as the methods of the present invention—which can be applied stably in clinical routine—a thorough in silico analysis can be necessary. The proposed principle is based on a combination of different approaches, e.g. alignment with at least one, preferably more reference genomes and/or assembly of the genome and correlation of mutations found in every sample, e.g. from each patient, with all references and drugs, e.g. antibiotics, and search for mutations which occur in several drug and several strains.

[0137] Using the above steps a list of mutations as well of genes is generated. These can be stored in databases and statistical models can be derived from the databases. The statistical models can be based on at least one or more mutations at least one or more genes. Statistical models that can be trained can be combined from mutations and genes. Examples of algorithms that can produce such models are association Rules, Support Vector Machines, Decision Trees, Decision Forests, Discriminant-Analysis, Cluster-Methods, and many more.

[0138] The goal of the training is to allow a reproducible, standardized application during routine procedures.

[0139] For this, for example, a genome or parts of the genome of a microorganism can be sequenced from a patient to be diagnosed. Afterwards, core characteristics can be derived from the sequence data which can be used to predict resistance. These are the points in the database used for the final model, i.e. at least one mutation or at least one gene, but also combinations of mutations, etc.

[0140] The corresponding characteristics can be used as input for the statistical model and thus enable a prognosis for new patients. Not only the information regarding all resistances of all microorganisms, e.g. of Proteus species, against all drugs, e.g. antibiotics, can be integrated in a computer decision support tool, but also corresponding directives (e.g. EUCAST) so that only treatment proposals are made that are in line with the directives.

[0141] A ninth aspect of the present invention relates to the use of the computer program product according to the eighth aspect for acquiring an antimicrobial drug, e.g. antibiotic, resistance profile for bacterial microorganisms of Proteus species or in a method of the third aspect of the invention.

[0142] In a tenth aspect a method of selecting a treatment of a patient having an infection with a bacterial microorganism of Proteus species, comprising:

obtaining or providing a first data set comprising a gene sequence of at least one clinical isolate of the microorganism from the patient;
providing a second data set of antimicrobial drug, e.g. antibiotic, resistance of a plurality of clinical isolates of the microorganism;
aligning the gene sequences of the first data set to at least one, preferably one, reference genome of the microorganism, and/or assembling the gene sequence of the first data set, at least in part;
analyzing the gene sequences of the first data set for genetic variants to obtain a third data set of genetic variants of the first data set;
correlating the third data set with the second data set of antimicrobial drug, e.g. antibiotic, resistance of a plurality of clinical isolates of the microorganism and statistically analyzing the correlation;
determining the genetic sites in the genome of the clinical isolate of the microorganism of the first data set associated with antimicrobial drug, e.g. antibiotic, resistance; and selecting a treatment of the patient with one or more antimicrobial, e.g. antibiotic, drugs different from the ones identified in the determination of the genetic sites associated with antimicrobial drug, e.g. antibiotic, resistance is disclosed.

[0143] Again, the steps can be carried out as similar steps before.

[0144] In this method, as well as similar ones, no aligning is necessary, as the unknown sample can be directly correlated, after the genome or genome sequences are produced, with the second data set and thus mutations and antimicrobial drug, e.g. antibiotic, resistances can be determined. The first data set can be assembled, for example, using known techniques. According to certain embodiments, statistical analysis in the present method is carried out using Fisher's test with p<10⁻⁶, preferably p<10⁻⁹, particularly p<10⁻¹⁰. Also, according to certain embodiments, the method further comprises correlating different genetic sites to each other.

[0145] An eleventh aspect of the present invention is directed to a computer program product comprising computer executable instructions which, when executed, perform a method according to the tenth aspect.

[0146] According to a twelfth aspect of the present invention, a diagnostic method of determining an infection of a patient with Proteus species potentially resistant to antimicrobial drug treatment, which can also be described as a method of determining an antimicrobial drug, e.g. antibiotic, resistant Proteus infection of a patient is disclosed, comprising the steps of:

a) obtaining or providing a sample containing or suspected of containing at least one Proteus species from the patient;
b) determining the presence of at least one mutation in at least two genes from the group of genes listed in Table 5, preferably Table 5a, wherein the presence of said at least two mutations is indicative of an antimicrobial drug, e.g. antibiotic, resistant Proteus infection in said patient.

[0147] A thirteenth aspect of the invention discloses a method of selecting a treatment of a patient suffering from an antimicrobial drug, e.g. antibiotic, resistant Proteus infection, comprising the steps of:

a) obtaining or providing a sample containing or suspected of containing at least one Proteus species from the patient;
b) determining the presence of at least one mutation in at least two genes from the group of genes listed in Table 5, preferably Table 5a, wherein the presence of said at least two mutations is indicative of a resistance to one or more antimicrobial, e.g. antibiotic, drugs;
c) identifying said at least one or more antimicrobial, e.g. antibiotic, drugs; and
d) selecting one or more antimicrobial, e.g. antibiotic, drugs different from the ones identified in step c) and being suitable for the treatment of a Proteus infection.

[0148] Again, the steps can be carried out as in similar methods before, e.g. as in the first and second aspect of the invention. In the twelfth and thirteenth aspect of the invention, all classes of antibiotics considered in the present method are covered.

[0149] Herein, the genes in Table 5 are the following:

parC, secG, cyoC, pykF, flhB, dedA, crr, murF, gmhB, purH, PMI2939, fdoG, PMI3715, gpmB, dnaK, nhaA, ribF, ileS, carA, hybO, hybA, hybB, hybD, cpdB, yajC, secD, secF, dxs, cyoE, cyoD, cyoB, tig, acrA, priC, dnaX, PMI0140, recR, dksA, pyrG, eno, epd, fbaA, PMI0341, nqrC, rimM, trmD, rplS, PMI0392, lipA, lipB, PMI3693, ompF, PMI3449, msbB, nagC, gyrB, PMI2908, rpoC, PMI2124, PMI0936, mgtE, PMI1294, dmsA, gabD, PMI1896, PMI2380, hpmA, cscA, PMI2922, PMI1221, PMI0910, sucC, caiA, PMI3369, hemA, holC, gppA, PMI2178, gpsA, argl, PMI2961, PMI2783, kdsC, dacA, galK, emrB, fabF, pheT, cheB, nuoL, nuoJ, fixC, PMI2772, kefB, pstS, frdB, rpoN, tatA, yfbB, PMI2201, PMI0191, prc, fliK, nuoG, nuoC, atpA, and ilvB.

[0150] Herein, the genes in Table 5a are the following:

secG, cyoC, pykF, flhB, dedA, crr, murF, gmhB, purH, PMI2939, fdoG, PMI3715, gpmB, dnaK, nhaA, ribF, ileS, carA, hybO, hybA, hybB, hybD, cpdB, yajC, secD, secF, dxs, cyoE, cyoD, cyoB, tig, priC, dnaX, PMI0140, recR, dksA, pyrG, eno, epd, fbaA, PMI0341, nqrC, rimM, trmD, rplS, PMI0392, lipA, lipB, PMI3693, ompF, PMI3449, msbB, nagC, PMI2908, rpoC, PMI2124, PMI0936, mgtE, PMI1294, dmsA, gabD, PMI1896, PMI2380, hpmA, cscA, PMI2922, PMI1221, PMI0910, sucC, caiA, PMI3369, hemA, holC, gppA, PMI2178, gpsA, argl, PMI2961, PMI2783, kdsC, dacA, galK, emrB, fabF, pheT, cheB, nuoL, nuoJ, fixC, PMI2772, kefB, pstS, frdB, rpoN, tatA, yfbB, PMI2201, PMI0191, prc, fliK, nuoG, nuoC, atpA, and ilvB.

[0151] According to certain embodiments, mutations in at least two, three, four, five, six, seven, eight, nine or ten genes are determined in any of the methods of the present invention, e.g. in at least two genes or in at least three genes. Instead of testing only single genes or mutants, a combination of several variant positions can improve the prediction accuracy and further reduce false positive findings that are influenced by other factors. Therefore, it is in particular preferred to determine the presence of a mutation in 2, 3, 4, 5, 6, 7, 8 or 9 (or more) genes selected from Table 5, preferably Table 5a.

TABLE 5
List of genes

| | | | | |
|---|---|---|---|---|
| parC | secG | cyoC | pykF | flhB |
| dedA | crr | murF | gmhB | purH |
| PMI2939 | fdoG | PMI3715 | gpmB | dnaK |
| nhaA | ribF | ileS | carA | hyb0 |
| hybA | hybB | hybD | cpdB | yajC |
| secD | secF | dxs | cyoE | cyoD |
| cyoB | tig | acrA | priC | dnaX |
| PMI0140 | recR | dksA | pyrG | eno |
| epd | fbaA | PMI0341 | nqrC | rimM |
| trmD | rplS | PMI0392 | lipA | lipB |
| PMI3693 | ompF | PMI3449 | msbB | nagC |
| gyrB | PMI2908 | rpoC | PMI2124 | PMI0936 |
| mgtE | PMI1294 | dmsA | gabD | PMI1896 |
| PMI2380 | hpmA | cscA | PMI2922 | PMI1221 |
| PMI0910 | sucC | caiA | PMI3369 | hemA |
| holC | gppA | PMI2178 | gpsA | argI |
| PMI2961 | PMI2783 | kdsC | dacA | galK |
| emrB | fabF | pheT | cheB | nuoL |
| nuoJ | fixC | PMI2772 | kefB | pstS |
| frdB | rpoN | tatA | yfbB | PMI2201 |
| PMI0191 | prc | fliK | nuoG | nuoC |
| atpA | ilvB | | | |

TABLE 5a
List of genes

| | | | | |
|---|---|---|---|---|
| ilvB | secG | cyoC | pykF | flhB |
| dedA | crr | murF | gmhB | purH |
| PMI2939 | fdoG | PMI3715 | gpmB | dnaK |
| nhaA | ribF | ileS | carA | hyb0 |
| hybA | hybB | hybD | cpdB | yajC |
| secD | secF | dxs | cyoE | cyoD |
| cyoB | tig | atpA | priC | dnaX |
| PMI0140 | recR | dksA | pyrG | eno |
| epd | fbaA | PMI0341 | nqrC | rimM |
| trmD | rplS | PMI0392 | lipA | lipB |
| PMI3693 | ompF | PMI3449 | msbB | nagC |
| nuoC | PMI2908 | rpoC | PMI2124 | PMI0936 |
| mgtE | PMI1294 | dmsA | gabD | PMI1896 |
| PMI2380 | hpmA | cscA | PMI2922 | PMI1221 |
| PMI0910 | sucC | caiA | PMI3369 | hemA |
| holC | gppA | PMI2178 | gpsA | argI |
| PMI2961 | PMI2783 | kdsC | dacA | galK |
| emrB | fabF | pheT | cheB | nuoL |
| nuoJ | fixC | PMI2772 | kefB | pstS |
| frdB | rpoN | tatA | yfbB | PMI2201 |
| PMI0191 | prc | fliK | nuoG | |

[0152] Further, according to certain embodiments, the reference genome of Proteus is again NC_010554 as annotated at the NCBI. According to certain embodiments, statistical analysis in the present methods is carried out using Fisher's test with p<10⁻⁶, preferably p<10⁻⁹, particularly p<10⁻¹⁰. Also, according to certain embodiments, the method further comprises correlating different genetic sites to each other. Also the other aspects of the embodiments of the first and second aspect of the invention apply.

TABLE 6
List for lactam antibiotics

| gene | | | | genbank protein |
|---|---|---|---|---|
| name | POS | antibiotic | p-value (FDR) | accession number |
| parC | 2562578 | CF; T/S; CP; CFT; GM; CFZ; CRM; CAX; CPE; AM; A/S; LVX; AUG | 4.65979E−71 | YP_002152062.1 |
| PMI3693 | 4032998 | CF; TE; CFT; CFZ; CRM; CAX; P/T; AM; A/S; AUG | 2.1905E−34 | YP_002153368.1 |
| ompF | 849533 | CF; TE; CFT; CFZ; CRM; CAX; P/T; AM; A/S; AUG | 1.44267E−30 | YP_002150530.1 |
| PMI3449 | 3777669 | CF; CFT; CFZ; CRM; CAX; CPE; AM; A/S; AUG | 9.11622E−26 | YP_002153133.1 |
| msbB | 1214898 | CF; CFT; CFZ; CRM; CAX; CPE; AM; A/S; AUG | 5.99293E−22 | YP_002150887.1 |
| nagC | 521806 | CF; CFT; CFZ; CRM; CAX; CPE; AM; A/S; AUG | 1.38786E−20 | YP_002150224.1 |
| gyrB | 3450194 | CF; CFT; CFZ; CRM; CAX; P/T; AM; A/S; AUG | 1.177E−19 | YP_002152825.1 |
| secG | 3741905 | CF; TE; CFT; CFZ; CRM; CP; CAX; LVX; AM; A/S; AUG | 5.11728E−63 | YP_002153099.1 |
| cyoC | 131826 | CF; TE; CFT; CFZ; CRM; CP; CAX; LVX; AM; A/S; AUG | 7.38724E−63 | YP_002149890.1 |
| pykF | 1482764 | CF; TE; CFT; CFZ; CRM; CP; CAX; LVX; AM; A/S; AUG | 7.38724E−63 | YP_002151136.1 |
| flhB | 1771087 | CF; TE; CFT; CFZ; CRM; CP; CAX; LVX; AM; A/S; AUG | 7.38724E−63 | YP_002151391.1 |
| flhB | 1771119 | CF; TE; CFT; CFZ; CRM; CP; CAX; LVX; AM; A/S; AUG | 7.38724E−63 | YP_002151391.1 |
| dedA | 1918241 | CF; TE; CFT; CFZ; CRM; CP; CAX; LVX; AM; A/S; AUG | 7.38724E−63 | YP_002151518.1 |
| crr | 1968294 | CF; TE; CFT; CFZ; CRM; CP; CAX; LVX; AM; A/S; AUG | 7.38724E−63 | YP_002151557.1 |
| murF | 2238063 | CF; TE; CFT; CFZ; CRM; CP; CAX; LVX; AM; A/S; AUG | 7.38724E−63 | YP_002151793.1 |
| murF | 2238072 | CF; TE; CFT; CFZ; CRM; CP; CAX; LVX; AM; A/S; AUG | 7.38724E−63 | YP_002151793.1 |
| murF | 2238088 | CF; TE; CFT; CFZ; CRM; CP; CAX; LVX; AM; A/S; AUG | 7.38724E−63 | YP_002151793.1 |
| murF | 2238090 | CF; TE; CFT; CFZ; CRM; CP; CAX; LVX; AM; A/S; AUG | 7.38724E−63 | YP_002151793.1 |
| PMI2939 | 3221491 | CF; TE; CFT; CFZ; CRM; CP; CAX; LVX; AM; A/S; AUG | 7.38724E−63 | YP_002152640.1 |
| PMI2939 | 3221494 | CF; TE; CFT; CFZ; CRM; CP; CAX; LVX; AM; A/S; AUG | 7.38724E−63 | YP_002152640.1 |
| PMI3715 | 4059624 | CF; TE; CFT; CFZ; CRM; CP; CAX; LVX; AM; A/S; AUG | 7.38724E−63 | YP_002153390.1 |
| PMI3715 | 4059634 | CF; TE; CFT; CFZ; CRM; CP; CAX; LVX; AM; A/S; AUG | 7.38724E−63 | YP_002153390.1 |
| gpmB | 4060202 | CF; TE; CFT; CFZ; CRM; CP; CAX; LVX; AM; A/S; AUG | 7.38724E−63 | YP_002153391.1 |
| cyoC | 131835 | CF; TE; CFT; CFZ; CRM; CP; CAX; LVX; AM; A/S; AUG | 8.38542E−63 | YP_002149890.1 |

FDR: determined according to FDR (Benjamini Hochberg) method (Benjamini Hochberg, 1995)

TABLE 6A
List for lactam antibiotics

| gene | | | | genbank protein |
|---|---|---|---|---|
| name | POS | antibiotic | p-value (FDR) | accession number |
| PMI3693 | 4032998 | CF; TE; CFT; CFZ; CRM; CAX; P/T; AM; A/S; AUG | 2.1905E−34 | YP_002153368.1 |
| ompF | 849533 | CF; TE; CFT; CFZ; CRM; CAX; P/T; AM; A/S; AUG | 1.44267E−30 | YP_002150530.1 |
| PMI3449 | 3777669 | CF; CFT; CFZ; CRM; CAX; CPE; AM; A/S; AUG | 9.11622E−26 | YP_002153133.1 |
| msbB | 1214898 | CF; CFT; CFZ; CRM; CAX; CPE; AM; A/S; AUG | 5.99293E−22 | YP_002150887.1 |
| nagC | 521806 | CF; CFT; CFZ; CRM; CAX; CPE; AM; A/S; AUG | 1.38786E−20 | YP_002150224.1 |
| secG | 3741905 | CF; TE; CFT; CFZ; CRM; CP; CAX; LVX; AM; A/S; AUG | 5.11728E−63 | YP_002153099.1 |
| cyoC | 131826 | CF; TE; CFT; CFZ; CRM; CP; CAX; LVX; AM; A/S; AUG | 7.38724E−63 | YP_002149890.1 |
| pykF | 1482764 | CF; TE; CFT; CFZ; CRM; CP; CAX; LVX; AM; A/S; AUG | 7.38724E−63 | YP_002151136.1 |
| flhB | 1771087 | CF; TE; CFT; CFZ; CRM; CP; CAX; LVX; AM; A/S; AUG | 7.38724E−63 | YP_002151391.1 |
| flhB | 1771119 | CF; TE; CFT; CFZ; CRM; CP; CAX; LVX; AM; A/S; AUG | 7.38724E−63 | YP_002151391.1 |
| dedA | 1918241 | CF; TE; CFT; CFZ; CRM; CP; CAX; LVX; AM; A/S; AUG | 7.38724E−63 | YP_002151518.1 |
| crr | 1968294 | CF; TE; CFT; CFZ; CRM; CP; CAX; LVX; AM; A/S; AUG | 7.38724E−63 | YP_002151557.1 |
| murF | 2238063 | CF; TE; CFT; CFZ; CRM; CP; CAX; LVX; AM; A/S; AUG | 7.38724E−63 | YP_002151793.1 |
| murF | 2238072 | CF; TE; CFT; CFZ; CRM; CP; CAX; LVX; AM; A/S; AUG | 7.38724E−63 | YP_002151793.1 |
| murF | 2238088 | CF; TE; CFT; CFZ; CRM; CP; CAX; LVX; AM; A/S; AUG | 7.38724E−63 | YP_002151793.1 |
| murF | 2238090 | CF; TE; CFT; CFZ; CRM; CP; CAX; LVX; AM; A/S; AUG | 7.38724E−63 | YP_002151793.1 |
| PMI2939 | 3221491 | CF; TE; CFT; CFZ; CRM; CP; CAX; LVX; AM; A/S; AUG | 7.38724E−63 | YP_002152640.1 |
| PMI2939 | 3221494 | CF; TE; CFT; CFZ; CRM; CP; CAX; LVX; AM; A/S; AUG | 7.38724E−63 | YP_002152640.1 |
| PMI3715 | 4059624 | CF; TE; CFT; CFZ; CRM; CP; CAX; LVX; AM; A/S; AUG | 7.38724E−63 | YP_002153390.1 |
| PMI3715 | 4059634 | CF; TE; CFT; CFZ; CRM; CP; CAX; LVX; AM; A/S; AUG | 7.38724E−63 | YP_002153390.1 |
| gpmB | 4060202 | CF; TE; CFT; CFZ; CRM; CP; CAX; LVX; AM; A/S; AUG | 7.38724E−63 | YP_002153391.1 |
| cyoC | 131835 | CF; TE; CFT; CFZ; CRM; CP; CAX; LVX; AM; A/S; AUG | 8.38542E−63 | YP_002149890.1 |

[0153] According to certain embodiments of the method of the twelfth and/or thirteenth aspect of the present invention, as well as also of the eighteenth aspect of the present invention, the antimicrobial drug is an antibiotic. According to certain embodiments, the antibiotic is a lactam antibiotic and a mutation in at least one of the genes listed in Table 6, preferably Table 6a, is detected, or a mutation in at least one of the positions (denoted POS in the tables) listed in Table 6, preferably Table 6a.

[0154] According to certain embodiments of the method of the twelfth and/or thirteenth aspect of the present invention, as well as also of the eighteenth aspect of the present invention, the antibiotic is at least one of CF, CFT, CFZ, CRM, CAX, AM, A/S and AUG and a mutation in at least one of the genes of parC, PMI3693, ompF, PMI3449, msbB, nagC, gyrB, secG, cyoC, pykF, flhB, dedA, crr, murF, PMI2939, PMI3715, gpmB, preferably PMI3693, ompF, PMI3449, msbB, nagC, secG, cyoC, pykF, flhB, dedA, crr, murF, PMI2939, PMI3715, gpmB, is detected, or a mutation in at least one of the positions of 2562578, 4032998, 849533, 3777669, 1214898, 521806, 3450194, 3741905, 131826, 1482764, 1771087, 1771119, 1918241, 1968294, 2238063, 2238072, 2238088, 2238090, 3221491, 3221494, 4059624, 4059634, 4060202, 131835, preferably 4032998, 849533, 3777669, 1214898, 521806, 3741905, 131826, 1482764, 1771087, 1771119, 1918241, 1968294, 2238063, 2238072, 2238088, 2238090, 3221491, 3221494, 4059624, 4059634, 4060202, 131835.

[0155] According to certain embodiments of the method of the twelfth and/or thirteenth aspect of the present invention, as well as also of the eighteenth aspect of the present invention, the antibiotic is CPE and a mutation in at least one of the genes of parC, PMI3449, msbB, nagC, preferably PMI3449, msbB, nagC, is detected, or a mutation in at least one of the positions of 2562578, 3777669, 1214898, 521806, preferably 3777669, 1214898, 521806.

[0156] According to certain embodiments of the method of the twelfth and/or thirteenth aspect of the present invention, as well as also of the eighteenth aspect of the present invention, the antibiotic is P/T and a mutation in at least one of the genes of PMI3693, ompF, gyrB, preferably PMI3693, ompF, is detected, or a mutation in at least one of the positions of 4032998, 849533, 3450194, preferably 4032998, 849533.

[0157] According to certain embodiments of the method of the twelfth and/or thirteenth aspect of the present invention, as well as also of the eighteenth aspect of the present invention, the antibiotic is a quinolone antibiotic and a mutation in at least one of the genes listed in Table 7, preferably Table 7a, is detected, or a mutation in at least one of the positions (denoted POS in the tables) listed in Table 7, preferably Table 7a.

[0158] According to certain embodiments of the method of the twelfth and/or thirteenth aspect of the present invention, as well as also of the eighteenth aspect of the present invention, the antibiotic is at least one of CP and LVX and a mutation in at least one of the genes of parC, secG, cyoC, pykF, flhB, dedA, crr, murF, PMI2939, PMI3715, gpmB, gmhB, purH, fdoG, preferably secG, cyoC, pykF, flhB, dedA, crr, murF, PMI2939, PMI3715, gpmB, gmhB, purH, fdoG, is detected, or a mutation in at least one of the positions of 2562578, 3741905, 131826, 1482764, 1771087, 1771119, 1918241, 1968294, 2238063, 2238072, 2238088, 2238090, 3221491, 3221494, 4059624, 4059634, 4060202, 2454709, 3039125, 3422635, 131835, preferably 3741905, 131826, 1482764, 1771087, 1771119, 1918241, 1968294, 2238063, 2238072, 2238088, 2238090, 3221491, 3221494, 4059624, 4059634, 4060202, 2454709, 3039125, 3422635, 131835.

[0159] According to certain embodiments of the method of the twelfth and/or thirteenth aspect of the present invention, as well as also of the eighteenth aspect of the present invention, the antibiotic is an aminoglycoside antibiotic and a mutation in at least one of the genes listed in Table 8 is detected, or a mutation in at least one of the positions (denoted POS in the tables) listed in Table 8.

TABLE 7
List for quinolone antibiotics

| gene | | | p-value | genbank protein |
|---|---|---|---|---|
| name | POS | antibiotic | (FDR) | accession number |
| parC | 2562578 | CF; T/S; CP; CFT; GM; CFZ; CRM; CAX; CPE; AM; A/S; LVX; AUG | 4.65979E−71 | YP_002152062.1 |
| secG | 3741905 | CF; TE; CFT; CFZ; CRM; CP; CAX; LVX; AM; A/S; AUG | 5.11728E−63 | YP_002153099.1 |
| cyoC | 131826 | CF; TE; CFT; CFZ; CRM; CP; CAX; LVX; AM; A/S; AUG | 7.38724E−63 | YP_002149890.1 |
| pykF | 1482764 | CF; TE; CFT; CFZ; CRM; CP; CAX; LVX; AM; A/S; AUG | 7.38724E−63 | YP_002151136.1 |
| flhB | 1771087 | CF; TE; CFT; CFZ; CRM; CP; CAX; LVX; AM; A/S; AUG | 7.38724E−63 | YP_002151391.1 |
| flhB | 1771119 | CF; TE; CFT; CFZ; CRM; CP; CAX; LVX; AM; A/S; AUG | 7.38724E−63 | YP_002151391.1 |
| dedA | 1918241 | CF; TE; CFT; CFZ; CRM; CP; CAX; LVX; AM; A/S; AUG | 7.38724E−63 | YP_002151518.1 |
| crr | 1968294 | CF; TE; CFT; CFZ; CRM; CP; CAX; LVX; AM; A/S; AUG | 7.38724E−63 | YP_002151557.1 |
| murF | 2238063 | CF; TE; CFT; CFZ; CRM; CP; CAX; LVX; AM; A/S; AUG | 7.38724E−63 | YP_002151793.1 |
| murF | 2238072 | CF; TE; CFT; CFZ; CRM; CP; CAX; LVX; AM; A/S; AUG | 7.38724E−63 | YP_002151793.1 |
| murF | 2238088 | CF; TE; CFT; CFZ; CRM; CP; CAX; LVX; AM; A/S; AUG | 7.38724E−63 | YP_002151793.1 |
| murF | 2238090 | CF; TE; CFT; CFZ; CRM; CP; CAX; LVX; AM; A/S; AUG | 7.38724E−63 | YP_002151793.1 |
| PMI2939 | 3221491 | CF; TE; CFT; CFZ; CRM; CP; CAX; LVX; AM; A/S; AUG | 7.38724E−63 | YP_002152640.1 |
| PMI2939 | 3221494 | CF; TE; CFT; CFZ; CRM; CP; CAX; LVX; AM; A/S; AUG | 7.38724E−63 | YP_002152640.1 |
| PMI3715 | 4059624 | CF; TE; CFT; CFZ; CRM; CP; CAX; LVX; AM; A/S; AUG | 7.38724E−63 | YP_002153390.1 |
| PMI3715 | 4059634 | CF; TE; CFT; CFZ; CRM; CP; CAX; LVX; AM; A/S; AUG | 7.38724E−63 | YP_002153390.1 |
| gpmB | 4060202 | CF; TE; CFT; CFZ; CRM; CP; CAX; LVX; AM; A/S; AUG | 7.38724E−63 | YP_002153391.1 |
| gmhB | 2454709 | CF; TE; CFZ; CRM; CP; CAX; LVX; AM; A/S; AUG | 7.38724E−63 | YP_002151976.1 |
| purH | 3039125 | CF; TE; CFZ; CRM; CP; CAX; LVX; AM; A/S; AUG | 7.38724E−63 | YP_002152469.1 |
| fdoG | 3422635 | CF; T/S; TE; CFZ; CRM; CP; CAX; LVX; AM; A/S; AUG | 7.38724E−63 | YP_002152801.1 |
| cyoC | 131835 | CF; TE; CFT; CFZ; CRM; CP; CAX; LVX; AM; A/S; AUG | 8.38542E−63 | YP_002149890.1 |

TABLE 7a
List for quinolone antibiotics

| gene | | | p-value | genbank protein |
|---|---|---|---|---|
| name | POS | antibiotic | (FDR) | accession number |
| secG | 3741905 | CF; TE; CFT; CFZ; CRM; CP; CAX; LVX; AM; A/S; AUG | 5.11728E−63 | YP_002153099.1 |
| cyoC | 131826 | CF; TE; CFT; CFZ; CRM; CP; CAX; LVX; AM; A/S; AUG | 7.38724E−63 | YP_002149890.1 |
| pykF | 1482764 | CF; TE; CFT; CFZ; CRM; CP; CAX; LVX; AM; A/S; AUG | 7.38724E−63 | YP_002151136.1 |
| flhB | 1771087 | CF; TE; CFT; CFZ; CRM; CP; CAX; LVX; AM; A/S; AUG | 7.38724E−63 | YP_002151391.1 |
| flhB | 1771119 | CF; TE; CFT; CFZ; CRM; CP; CAX; LVX; AM; A/S; AUG | 7.38724E−63 | YP_002151391.1 |
| dedA | 1918241 | CF; TE; CFT; CFZ; CRM; CP; CAX; LVX; AM; A/S; AUG | 7.38724E−63 | YP_002151518.1 |
| crr | 1968294 | CF; TE; CFT; CFZ; CRM; CP; CAX; LVX; AM; A/S; AUG | 7.38724E−63 | YP_002151557.1 |
| murF | 2238063 | CF; TE; CFT; CFZ; CRM; CP; CAX; LVX; AM; A/S; AUG | 7.38724E−63 | YP_002151793.1 |
| murF | 2238072 | CF; TE; CFT; CFZ; CRM; CP; CAX; LVX; AM; A/S; AUG | 7.38724E−63 | YP_002151793.1 |
| murF | 2238088 | CF; TE; CFT; CFZ; CRM; CP; CAX; LVX; AM; A/S; AUG | 7.38724E−63 | YP_002151793.1 |
| murF | 2238090 | CF; TE; CFT; CFZ; CRM; CP; CAX; LVX; AM; A/S; AUG | 7.38724E−63 | YP_002151793.1 |
| PMI2939 | 3221491 | CF; TE; CFT; CFZ; CRM; CP; CAX; LVX; AM; A/S; AUG | 7.38724E−63 | YP_002152640.1 |
| PMI2939 | 3221494 | CF; TE; CFT; CFZ; CRM; CP; CAX; LVX; AM; A/S; AUG | 7.38724E−63 | YP_002152640.1 |
| PMI3715 | 4059624 | CF; TE; CFT; CFZ; CRM; CP; CAX; LVX; AM; A/S; AUG | 7.38724E−63 | YP_002153390.1 |
| PMI3715 | 4059634 | CF; TE; CFT; CFZ; CRM; CP; CAX; LVX; AM; A/S; AUG | 7.38724E−63 | YP_002153390.1 |
| gpmB | 4060202 | CF; TE; CFT; CFZ; CRM; CP; CAX; LVX; AM; A/S; AUG | 7.38724E−63 | YP_002153391.1 |
| gmhB | 2454709 | CF; TE; CFZ; CRM; CP; CAX; LVX; AM; A/S; AUG | 7.38724E−63 | YP_002151976.1 |
| purH | 3039125 | CF; TE; CFZ; CRM; CP; CAX; LVX; AM; A/S; AUG | 7.38724E−63 | YP_002152469.1 |
| fdoG | 3422635 | CF; T/S; TE; CFZ; CRM; CP; CAX; LVX; AM; A/S; AUG | 7.38724E−63 | YP_002152801.1 |
| cyoC | 131835 | CF; TE; CFT; CFZ; CRM; CP; CAX; LVX; AM; A/S; AUG | 8.38542E−63 | YP_002149890.1 |

TABLE 8
List of aminoglycoside antibiotics

| | | | p-value | genbank protein |
|---|---|---|---|---|
| gene name | POS | antibiotic | (FDR) | accession number |
| PMI2908 | 3189475 | TO; GM | 1.3778E−18 | YP_002152609.1 |
| rpoC | 3053893 | T/S; LVX; CP; TO; GM | 9.3802E−18 | YP_002152485.1 |
| PMI2124 | 2299533 | T/S; CP; GM; A/S; TO; LVX | 2.5842E−17 | YP_002151843.1 |
| PMI0936 | 1013893 | T/S; LVX; CP; TO; GM | 3.7067E−17 | YP_002150693.1 |
| mgtE | 2281052 | CF; T/S; CP; GM; CFZ; TO; | 1.6949E−16 | YP_002151828.1 |
| | | AM; A/S; LVX; AUG | | |
| PMI1294 | 1367519 | CF; T/S; CP; GM; CFZ; TO; | 1.9698E−16 | YP_002151025.1 |
| | | AM; A/S; LVX; AUG | | |
| dmsA | 1823348 | CF; T/S; CP; GM; CFZ; TO; | 2.0354E−16 | YP_002151436.1 |
| | | AM; A/S; LVX; AUG | | |
| gabD | 3708304 | CF; T/S; CP; GM; CFZ; TO; | 2.1492E−16 | YP_002153067.1 |
| | | AM; A/S; LVX; AUG | | |
| PMI1896 | 2041811 | CF; T/S; CP; GM; CFZ; TO; | 2.3262E−16 | YP_002151623.1 |
| | | AM; A/S; LVX; AUG | | |
| PMI2380 | 2603984 | CF; T/S; CP; GM; CFZ; TO; | 2.4203E−16 | YP_002152098.1 |
| | | AM; A/S; LVX; AUG | | |
| hpmA | 2218536 | CF; T/S; CP; GM; CFZ; TO; | 2.5198E−16 | YP_002151778.1 |
| | | AM; A/S; LVX; AUG | | |
| cscA | 2376673 | CF; T/S; CP; GM; CFZ; TO; | 2.5198E−16 | YP_002151908.1 |
| | | AM; A/S; LVX; AUG | | |
| PMI2922 | 3206198 | CF; T/S; CP; GM; CFZ; TO; | 2.5198E−16 | YP_002152623.1 |
| | | AM; A/S; LVX; AUG | | |
| PMI1221 | 1290778 | T/S; A/S; TO; AM; GM | 3.4286E−16 | YP_002150953.1 |
| PMI0910 | 994331 | T/S; CP; TO; GM | 3.4366E−16 | YP_002150667.1 |

[0160] According to certain embodiments of the method of the twelfth and/or thirteenth aspect of the present invention, as well as also of the eighteenth aspect of the present invention, the antibiotic is at least one of GM and TO and a mutation in at least one of the genes of PMI2908, rpoC, PMI2124, PMI0936, mgtE, PMI1294, dmsA, gabD, PMI1896, PMI2380, hpmA, cscA, PMI2922, PMI1221, PMI0910 is detected, or a mutation in at least one of the positions of 3189475, 3053893, 2299533, 1013893, 2281052, 1367519, 1823348, 3708304, 2041811, 2603984, 2218536, 2376673, 3206198, 1290778, 994331.

[0161] According to certain embodiments of the method of the twelfth and/or thirteenth aspect of the present invention, as well as also of the eighteenth aspect of the present invention, the antibiotic is an polyketide antibiotic and a mutation in at least one of the genes listed in Table 9 is detected, or a mutation in at least one of the positions (denoted POS in the tables) listed in Table 9.

[0162] According to certain embodiments of the method of the twelfth and/or thirteenth aspect of the present invention, as well as also of the eighteenth aspect of the present invention, the antibiotic is TE and a mutation in at least one of the genes of secG, cyoC, pykF, flhB, dedA, crr, murF, PMI2939, PMI3715, gpmB, gmhB, purH, fdoG is detected, or a mutation in at least one of the positions of 3741905, 131826, 1482764, 1771087, 1771119, 1918241, 1968294, 2238063, 2238072, 2238088, 2238090, 3221491, 3221494, 4059624, 4059634, 4060202, 2454709, 3039125, 3422635, 131835.

[0163] According to certain embodiments of the method of the seventeenth and/or eighteenth aspect of the present invention, the antibiotic is T/S and a mutation in at least one of the genes listed in Table 10, preferably Table 10a, is detected, or a mutation in at least one of the positions (denoted POS in the tables) listed in Table 10, preferably Table 10a.

TABLE 9
List of polyketides. preferably tetracycline

| | | | | genbank protein |
|---|---|---|---|---|
| gene name | POS | antibiotic | p-value (FDR) | accession number |
| secG | 3741905 | CF; TE; CFT; CFZ; CRM; CP; CAX; LVX; AM; A/S; AUG | 5.11728E−63 | YP_002153099.1 |
| cyoC | 131826 | CF; TE; CFT; CFZ; CRM; CP; CAX; LVX; AM; A/S; AUG | 7.38724E−63 | YP_002149890.1 |
| pykF | 1482764 | CF; TE; CFT; CFZ; CRM; CP; CAX; LVX; AM; A/S; AUG | 7.38724E−63 | YP_002151136.1 |
| flhB | 1771087 | CF; TE; CFT; CFZ; CRM; CP; CAX; LVX; AM; A/S; AUG | 7.38724E−63 | YP_002151391.1 |
| flhB | 1771119 | CF; TE; CFT; CFZ; CRM; CP; CAX; LVX; AM; A/S; AUG | 7.38724E−63 | YP_002151391.1 |
| dedA | 1918241 | CF; TE; CFT; CFZ; CRM; CP; CAX; LVX; AM; A/S; AUG | 7.38724E−63 | YP_002151518.1 |
| crr | 1968294 | CF; TE; CFT; CFZ; CRM; CP; CAX; LVX; AM; A/S; AUG | 7.38724E−63 | YP_002151557.1 |
| murF | 2238063 | CF; TE; CFT; CFZ; CRM; CP; CAX; LVX; AM; A/S; AUG | 7.38724E−63 | YP_002151793.1 |
| murF | 2238072 | CF; TE; CFT; CFZ; CRM; CP; CAX; LVX; AM; A/S; AUG | 7.38724E−63 | YP_002151793.1 |
| murF | 2238088 | CF; TE; CFT; CFZ; CRM; CP; CAX; LVX; AM; A/S; AUG | 7.38724E−63 | YP_002151793.1 |
| murF | 2238090 | CF; TE; CFT; CFZ; CRM; CP; CAX; LVX; AM; A/S; AUG | 7.38724E−63 | YP_002151793.1 |
| PMI2939 | 3221491 | CF; TE; CFT; CFZ; CRM; CP; CAX; LVX; AM; A/S; AUG | 7.38724E−63 | YP_002152640.1 |
| PMI2939 | 3221494 | CF; TE; CFT; CFZ; CRM; CP; CAX; LVX; AM; A/S; AUG | 7.38724E−63 | YP_002152640.1 |
| PMI3715 | 4059624 | CF; TE; CFT; CFZ; CRM; CP; CAX; LVX; AM; A/S; AUG | 7.38724E−63 | YP_002153390.1 |
| PMI3715 | 4059634 | CF; TE; CFT; CFZ; CRM; CP; CAX; LVX; AM; A/S; AUG | 7.38724E−63 | YP_002153390.1 |
| gpmB | 4060202 | CF; TE; CFT; CFZ; CRM; CP; CAX; LVX; AM; A/S; AUG | 7.38724E−63 | YP_002153391.1 |
| gmhB | 2454709 | CF; TE; CFZ; CRM; CP; CAX; LVX; AM; A/S; AUG | 7.38724E−63 | YP_002151976.1 |
| purH | 3039125 | CF; TE; CFZ; CRM; CP; CAX; LVX; AM; A/S; AUG | 7.38724E−63 | YP_002152469.1 |
| fdoG | 3422635 | CF; T/S; TE; CFZ; CRM; CP; CAX; LVX; AM; A/S; AUG | 7.38724E−63 | YP_002152801.1 |
| cyoC | 131835 | CF; TE; CFT; CFZ; CRM; CP; CAX; LVX; AM; A/S; AUG | 8.38542E−63 | YP_002149890.1 |

TABLE 10
List of others antibiotics ((benzene derived)/sulfonamide)

| | | | p-value | genbank protein |
|---|---|---|---|---|
| gene name | POS | antibiotic | (FDR) | accession number |
| parC | 2562578 | CF; T/S; CP; CFT; GM; CFZ; CRM; CAX; CPE; AM; A/S; LVX; AUG | 4.65979E−71 | YP_002152062.1 |
| fdoG | 3422635 | CF; T/S; TE; CFZ; CRM; CP; CAX; LVX; AM; A/S; AUG | 7.38724E−63 | YP_002152801.1 |
| dnaK | 19958 | CF; T/S; TE; CFZ; CRM; CP; CAX; LVX; AM; A/S; AUG | 1.04565E−62 | YP_002149796.1 |
| nhaA | 21872 | CF; T/S; TE; CFZ; CRM; CP; CAX; LVX; AM; A/S; AUG | 1.04565E−62 | YP_002149798.1 |
| fabF | 952747 | CF; T/S; TE; CFZ; CRM; CP; CAX; LVX; AM; A/S; AUG | 1.04565E−62 | YP_002150620.1 |
| pheT | 1104454 | CF; T/S; TE; CFZ; CRM; CP; CAX; LVX; AM; A/S; AUG | 1.04565E−62 | YP_002150789.1 |
| cheB | 1773746 | CF; T/S; TE; CFZ; CRM; CP; CAX; LVX; AM; A/S; AUG | 1.04565E−62 | YP_002151394.1 |
| nuoL | 1876979 | CF; T/S; TE; CFZ; CRM; CP; CAX; LVX; AM; A/S; AUG | 1.04565E−62 | YP_002151482.1 |
| nuoJ | 1879024 | CF; T/S; TE; CFZ; CRM; CP; CAX; LVX; AM; A/S; AUG | 1.04565E−62 | YP_002151484.1 |
| fixC | 2898978 | CF; T/S; TE; CFZ; CRM; CP; CAX; LVX; AM; A/S; AUG | 1.04565E−62 | YP_002152352.1 |
| PMI2772 | 3042468 | CF; T/S; TE; CFZ; CRM; CP; CAX; LVX; AM; A/S; AUG | 1.04565E−62 | YP_002152473.1 |
| kefB | 3076139 | CF; T/S; TE; CFZ; CRM; CP; CAX; LVX; AM; A/S; AUG | 1.04565E−62 | YP_002152506.1 |
| pstS | 3174532 | CF; T/S; TE; CFZ; CRM; CP; CAX; LVX; AM; A/S; AUG | 1.04565E−62 | YP_002152594.1 |
| frdB | 3918248 | CF; T/S; TE; CFZ; CRM; CP; CAX; LVX; AM; A/S; AUG | 1.04565E−62 | YP_002153262.1 |
| fixC | 2898937 | CF; T/S; TE; CFZ; CRM; CP; CAX; LVX; AM; A/S; AUG | 1.73077E−62 | YP_002152352.1 |

TABLE 10a
List of others antibiotics ((benzene derived)/sulfonamide)

| | | | p-value | genbank protein |
|---|---|---|---|---|
| gene name | POS | antibiotic | (FDR) | accession number |
| fdoG | 3422635 | CF; T/S; TE; CFZ; CRM; CP; CAX; LVX; AM; A/S; AUG | 7.38724E−63 | YP_002152801.1 |
| dnaK | 19958 | CF; T/S; TE; CFZ; CRM; CP; CAX; LVX; AM; A/S; AUG | 1.04565E−62 | YP_002149796.1 |
| nhaA | 21872 | CF; T/S; TE; CFZ; CRM; CP; CAX; LVX; AM; A/S; AUG | 1.04565E−62 | YP_002149798.1 |
| fabF | 952747 | CF; T/S; TE; CFZ; CRM; CP; CAX; LVX; AM; A/S; AUG | 1.04565E−62 | YP_002150620.1 |
| pheT | 1104454 | CF; T/S; TE; CFZ; CRM; CP; CAX; LVX; AM; A/S; AUG | 1.04565E−62 | YP_002150789.1 |
| cheB | 1773746 | CF; T/S; TE; CFZ; CRM; CP; CAX; LVX; AM; A/S; AUG | 1.04565E−62 | YP_002151394.1 |
| nuoL | 1876979 | CF; T/S; TE; CFZ; CRM; CP; CAX; LVX; AM; A/S; AUG | 1.04565E−62 | YP_002151482.1 |
| nuoJ | 1879024 | CF; T/S; TE; CFZ; CRM; CP; CAX; LVX; AM; A/S; AUG | 1.04565E−62 | YP_002151484.1 |
| fixC | 2898978 | CF; T/S; TE; CFZ; CRM; CP; CAX; LVX; AM; A/S; AUG | 1.04565E−62 | YP_002152352.1 |
| PMI2772 | 3042468 | CF; T/S; TE; CFZ; CRM; CP; CAX; LVX; AM; A/S; AUG | 1.04565E−62 | YP_002152473.1 |
| kefB | 3076139 | CF; T/S; TE; CFZ; CRM; CP; CAX; LVX; AM; A/S; AUG | 1.04565E−62 | YP_002152506.1 |
| pstS | 3174532 | CF; T/S; TE; CFZ; CRM; CP; CAX; LVX; AM; A/S; AUG | 1.04565E−62 | YP_002152594.1 |
| frdB | 3918248 | CF; T/S; TE; CFZ; CRM; CP; CAX; LVX; AM; A/S; AUG | 1.04565E−62 | YP_002153262.1 |
| fixC | 2898937 | CF; T/S; TE; CFZ; CRM; CP; CAX; LVX; AM; A/S; AUG | 1.73077E−62 | YP_002152352.1 |

[0164] A fourteenth aspect of the present invention is directed to a diagnostic method of determining an infection of a patient with Proteus species potentially resistant to antimicrobial drug treatment, which can also be described as method of determining an antimicrobial drug, e.g. antibiotic, resistant Proteus infection of a patient, comprising the steps of:

a) obtaining or providing a sample containing or suspected of containing at least one Proteus species from the patient;
b) determining the presence of at least one mutation in at least one gene from the group of genes consisting of secG, cyoC, pykF, flhB, dedA, crr, murF, gmhB, purH, PMI2939, fdoG, PMI3715, gpmB, particularly secG, cyoC, pykF, flhB, dedA, crr, purH, PMI2939, fdoG, PMI3715, gpmB, wherein the presence of said at least one mutation is indicative of an antimicrobial drug, e.g. antibiotic, resistant Proteus infection in said patient.

[0165] A fifteenth aspect of the present invention is directed to a method of selecting a treatment of a patient suffering from an antimicrobial drug, e.g. antibiotic, resistant Proteus infection, comprising the steps of:

a) obtaining or providing a sample containing or suspected of containing at least one Proteus species from the patient;
b) determining the presence of at least one mutation in at least one gene from the group of genes consisting of secG, cyoC, pykF, flhB, dedA, crr, murF, gmhB, purH, PMI2939, fdoG, PMI3715, gpmB, particularly secG, cyoC, pykF, flhB, dedA, crr, purH, PMI2939, fdoG, PMI3715, gpmB, wherein the presence of said at least one mutation is indicative of a resistance to one or more antimicrobial, e.g. antibiotic, drugs;
c) identifying said at least one or more antimicrobial, e.g. antibiotic, drugs; and
d) selecting one or more antimicrobial, e.g. antibiotic, drugs different from the ones identified in step c) and being suitable for the treatment of a Proteus infection.

[0166] Again, in the fourteenth and the fifteenth aspect the steps correspond to those in the first or second aspect, although only a mutation in at least one gene is determined.

[0167] A sixteenth aspect of the present invention is directed to a method of treating a patient suffering from an antimicrobial drug, e.g. antibiotic, resistant Proteus infection, comprising the steps of:

a) obtaining or providing a sample containing or suspected of containing at least one Proteus species from the patient;
b) determining the presence of at least one mutation in at least one gene from the group of genes consisting of secG, cyoC, pykF, flhB, dedA, crr, murF, gmhB, purH, PMI2939, fdoG, PMI3715, gpmB, particularly secG, cyoC, pykF, flhB, dedA, crr, purH, PMI2939, fdoG, PMI3715, gpmB, wherein the presence of said at least one mutation is indicative of a resistance to one or more antimicrobial, e.g. antibiotic, drugs;
c) identifying said at least one or more antimicrobial, e.g. antibiotic, drugs;
d) selecting one or more antimicrobial, e.g. antibiotic, drugs different from the ones identified in step c) and being suitable for the treatment of a Proteus infection; and e) treating the patient with said one or more antimicrobial, e.g. antibiotic, drugs.

[0168] A seventeenth aspect of the present invention is directed to a method of treating a patient suffering from an antimicrobial drug, e.g. antibiotic, resistant Proteus infection, comprising the steps of:

a) obtaining or providing a sample containing or suspected of containing at least one Proteus species from the patient;
b) determining the presence of at least one mutation in at least two genes from the group of genes consisting of parC, secG, cyoC, pykF, flhB, dedA, crr, murF, gmhB, purH, PMI2939, fdoG, PMI3715, gpmB, preferably secG, cyoC, pykF, flhB, dedA, crr, murF, gmhB, purH, PMI2939, fdoG, PMI3715, gpmB, wherein the presence of said at least two mutations is indicative of a resistance to one or more antimicrobial, e.g. antibiotic, drugs;
c) identifying said at least one or more antimicrobial, e.g. antibiotic, drugs;
d) selecting one or more antimicrobial, e.g. antibiotic, drugs different from the ones identified in step c) and being suitable for the treatment of a Proteus infection; and
e) treating the patient with said one or more antimicrobial, e.g. antibiotic, drugs.

[0169] An eighteenth aspect of the present invention is directed to a method of treating a patient suffering from an antimicrobial drug, e.g. antibiotic, resistant Proteus infection, comprising the steps of:

a) obtaining or providing a sample containing or suspected of containing at least one Proteus species from the patient;
b) determining the presence of at least one mutation in at least two genes from the group of genes listed in Table 5, preferably Table 5a, wherein the presence of said at least two mutations is indicative of a resistance to one or more antimicrobial, e.g. antibiotic, drugs;
c) identifying said at least one or more antimicrobial, e.g. antibiotic, drugs;
d) selecting one or more antimicrobial, e.g. antibiotic, drugs different from the ones identified in step c) and being suitable for the treatment of a Proteus infection; and
e) treating the patient with said one or more antimicrobial, e.g. antibiotic, drugs.

[0170] A nineteenth aspect of the present invention is directed to method of treating a patient suffering from an antimicrobial drug, e.g. antibiotic, resistant Proteus infection, comprising the steps of:

a) obtaining or providing a sample containing or suspected of containing at least one Proteus species from the patient;
b) determining the presence of at least one mutation in at least one gene from the group of genes listed in Table 11, preferably Table 11a, preferably from the group of genes listed in Table 12, wherein the presence of said at least one mutation is indicative of a resistance to one or more antimicrobial, e.g. antibiotic, drugs;
c) identifying said at least one or more antimicrobial, e.g. antibiotic, drugs;
d) selecting one or more antimicrobial, e.g. antibiotic, drugs different from the ones identified in step c) and being suitable for the treatment of a Proteus infection; and
e) treating the patient with said one or more antimicrobial, e.g. antibiotic, drugs.

[0171] Also in the sixteenth to nineteenth aspect of the invention, steps a) to d) are analogous to the steps in the method of the second aspect of the present invention. Step e) can be sufficiently carried out without being restricted and can be done e.g. non-invasively.

[0172] A twentieth aspect of the present invention is directed to a diagnostic method of determining an infection of a patient with Proteus species potentially resistant to antimicrobial drug treatment, which can also be described as method of determining an antimicrobial drug, e.g. antibiotic, resistant Proteus infection of a patient, comprising the steps of:

a) obtaining or providing a sample containing or suspected of containing at least one Proteus species from the patient;
b) determining the presence of at least one mutation in at least one gene from the group of genes listed in Table 11, preferably Table 11a, preferably from the group of genes listed in Table 12, wherein the presence of said at least one mutation is indicative of an antimicrobial drug, e.g. antibiotic, resistant Proteus infection in said patient.

[0173] A twenty-first aspect of the present invention is directed to a method of selecting a treatment of a patient suffering from an antimicrobial drug, e.g. antibiotic, resistant Proteus infection, comprising the steps of:

a) obtaining or providing a sample containing or suspected of containing at least one Proteus species from the patient;
b) determining the presence of at least one mutation in at least one gene from the group of genes listed in Table 11, preferably Table 11a, preferably from the group of genes listed in Table 12, wherein the presence of said at least one mutation is indicative of a resistance to one or more antimicrobial, e.g. antibiotic, drugs;
c) identifying said at least one or more antimicrobial, e.g. antibiotic, drugs; and
d) selecting one or more antimicrobial, e.g. antibiotic, drugs different from the ones identified in step c) and being suitable for the treatment of a Proteus infection.

[0174] Again, in the twentieth and the twenty-first aspect the steps correspond to those in the first or second aspect, although only a mutation in at least one gene is determined.

TABLE 11
List of genes

| | | | | |
|---|---|---|---|---|
| ilvB | secG | cyoC | pykF | flhB |
| dedA | crr | murF | gmhB | purH |
| PMI2939 | fdoG | PMI3715 | gpmB | dnaK |
| nhaA | ribF | ileS | carA | hyb0 |
| hybA | hybB | hybD | cpdB | yajC |
| secD | secF | dxs | cyoE | cyoD |
| cyoB | tig | acrA | priC | dnaX |
| PMI0140 | recR | dksA | pyrG | eno |
| epd | fbaA | PMI0341 | nqrC | rimM |
| trmD | rplS | PMI0392 | lipA | lipB |
| PMI3693 | atpA | PMI3449 | msbB | nagC |
| nuoC | PMI2908 | rpoC | PMI2124 | PMI0936 |
| mgtE | PMI1294 | dmsA | gabD | PMI1896 |
| PMI2380 | hpmA | cscA | PMI2922 | PMI1221 |
| PMI0910 | sucC | caiA | PMI3369 | hemA |
| holC | gppA | PMI2178 | gpsA | argI |
| PMI2961 | PMI2783 | kdsC | dacA | galK |
| emrB | fabF | pheT | cheB | nuoL |
| nuoJ | fixC | PMI2772 | kefB | pstS |
| frdB | rpoN | tatA | yfbB | PMI2201 |
| PMI0191 | prc | fliK | nuoG | |

TABLE 11a
List of genes

| | | | | |
|---|---|---|---|---|
| ilvB | secG | cyoC | pykF | flhB |
| dedA | crr | murF | gmhB | purH |
| PMI2939 | fdoG | PMI3715 | gpmB | dnaK |
| nhaA | ribF | ileS | carA | hyb0 |
| hybA | hybB | hybD | cpdB | yajC |
| secD | secF | dxs | cyoE | cyoD |
| cyoB | tig | nuoG | priC | dnaX |
| PMI0140 | recR | dksA | pyrG | eno |
| epd | fbaA | PMI0341 | nqrC | rimM |
| trmD | rplS | PMI0392 | lipA | lipB |
| PMI3693 | atpA | PMI3449 | msbB | nagC |
| nuoC | PMI2908 | rpoC | PMI2124 | PMI0936 |
| mgtE | PMI1294 | dmsA | gabD | PMI1896 |
| PMI2380 | hpmA | cscA | PMI2922 | PMI1221 |
| PMI0910 | sucC | caiA | PMI3369 | hemA |
| holC | gppA | PMI2178 | gpsA | argI |
| PMI2961 | PMI2783 | kdsC | dacA | galK |
| emrB | fabF | pheT | cheB | nuoL |
| nuoJ | fixC | PMI2772 | kefB | pstS |
| frdB | rpoN | tatA | yfbB | PMI2201 |
| PMI0191 | prc | fliK | | |

TABLE 12
List of genes

| | | | | |
|---|---|---|---|---|
| ilvB | secG | cyoC | pykF | flhB |
| dedA | crr | fliK | PMI0191 | purH |
| PMI2939 | fdoG | PMI3715 | gpmB | PMI2201 |
| nhaA | ribF | yfbB | frdB | hyb0 |
| hybA | hybB | hybD | cpdB | kefB |
| PMI2772 | fixC | dxs | cyoE | cyoD |
| cyoB | nuoJ | nuoL | priC | dnaX |
| PMI0140 | cheB | pheT | kdsC | PMI2783 |
| epd | fbaA | PMI0341 | nqrC | rimM |
| PMI2961 | argI | PMI0392 | lipA | lipB |
| PMI3693 | PMI2178 | PMI3449 | holC | nagC |
| nuoC | PMI2908 | PMI3369 | PMI2124 | PMI0936 |
| caiA | PMI1294 | dmsA | gabD | PMI1896 |
| PMI2380 | hpmA | cscA | PMI2922 | PMI1221 |
| PMI0910 | sucC | | | |

[0175] According to a twenty-second aspect of the present invention, a diagnostic method of determining an infection of a patient with Proteus species potentially resistant to antimicrobial drug treatment, which can also be described as a method of determining an antimicrobial drug, e.g. antibiotic, resistant Proteus infection of a patient is disclosed, comprising the steps of:

a) obtaining or providing a sample containing or suspected of containing at least one Proteus species from the patient;
b) determining the presence of at least one mutation in at least two genes from the group of genes listed in Table 13, preferably Table 13a, wherein the presence of said at least two mutations is indicative of an antimicrobial drug, e.g. antibiotic, resistant Proteus infection in said patient.

[0176] A twenty-third aspect of the invention discloses a method of selecting a treatment of a patient suffering from an antimicrobial drug, e.g. antibiotic, resistant Proteus infection, comprising the steps of:

a) obtaining or providing a sample containing or suspected of containing at least one Proteus species from the patient;
b) determining the presence of at least one mutation in at least two genes from the group of genes listed in Table 13, preferably Table 13a, wherein the presence of said at least two mutations is indicative of a resistance to one or more antimicrobial, e.g. antibiotic, drugs;
c) identifying said at least one or more antimicrobial, e.g. antibiotic, drugs; and
d) selecting one or more antimicrobial, e.g. antibiotic, drugs different from the ones identified in step c) and being suitable for the treatment of a Proteus infection.

[0177] Again, the steps can be carried out as in similar methods before, e.g. as in the first and second aspect of the invention. In the twenty-second and twenty-third aspect of the invention, as well as the twenty-fourth aspect, all classes of antibiotics considered in the present method are covered, the reference genome is again NC_010554 as annotated at the NCBI, and the statistical analysis is carried out using Fisher's test with p<10⁻⁶, preferably p<10⁻⁹, particularly p<10⁻¹⁰.

[0178] A twenty-fourth aspect of the present invention is directed to a method of treating a patient suffering from an antimicrobial drug, e.g. antibiotic, resistant Proteus infection, comprising the steps of:

a) obtaining or providing a sample containing or suspected of containing at least one Proteus species from the patient;
b) determining the presence of at least one mutation in at least two genes from the group of genes listed in Table 13, preferably Table 13a, wherein the presence of said at least two mutations is indicative of a resistance to one or more antimicrobial, e.g. antibiotic, drugs;
c) identifying said at least one or more antimicrobial, e.g. antibiotic, drugs;
d) selecting one or more antimicrobial, e.g. antibiotic, drugs different from the ones identified in step c) and being suitable for the treatment of a Proteus infection; and
e) treating the patient with said one or more antimicrobial, e.g. antibiotic, drugs.

[0179] Also in the twenty-fourth aspect of the invention, steps a) to d) are analogous to the steps in the method of the second aspect of the present invention. Step e) can be sufficiently carried out without being restricted and can be done e.g. non-invasively.

[0180] The genes in Table 13, as well as Table 13a, thereby cover still p-values with very high probability, with the last gene in Table 13 and the corresponding gene in Table 13a still having a p-value of 1.06789 E⁻⁶², with the same n and α as before.

TABLE 13
List of genes

| | | | | | | | |
|---|---|---|---|---|---|---|---|
| parC | secG | cyoC | pykF | flhB | dedA | crr | murF |
| gmhB | purH | PMI2939 | fdoG | PMI3715 | gpmB | dnaK | nhaA |
| ribF | ileS | carA | hyb0 | hybA | hybB | hybD | cpdB |
| yajC | secD | secF | dxs | cyoE | cyoD | cyoB | tig |
| acrA | priC | dnaX | PMI0140 | recR | dksA | dksA | pyrG |
| eno | epd | fbaA | PMI0341 | nqrC | rimM | trmD | rplS |
| PMI0392 | lipA | lipB | corC | miaB | ubiF | gltA | sdhC |
| sdhA | sdhB | sucA | sucB | sucC | PMI0580 | tolQ | tolB |
| pal | PMI0586 | gpmA | PMI0648 | clpA | serS | pflA | pflB |
| rpsA | aspC | ompF | asnC | pncB | rlmL | ompA | PMI0855 |
| PMI0856 | rpmF | plsX | fabH | fabG | fabF | lolC | PMI1014 |
| proQ | thrS | rpmI | rplT | pheS | pheT | prsA | ipk |
| prfA | hemK | znuA | pykA | fumC | nth | rnb | tyrS |
| gapA | pgsA | uvrC | guaB | xseA | dapA | upp | purM |
| PMI1580 | fliZ | fliA | fliG | fliK | fliL | fliN | flgB |
| flhA | cheY | cheB | cheR | PMI1665 | PMI1666 | motB | gyrA |
| nrdB | yfbB | nuoM | nuoL | nuoK | nuoJ | nuoI | nuoH |
| nuoG | nuoF | nuoE | nuoC | nuoA | PMI1763 | PMI1767 | ackA |
| purF | cvpA | fabB | ptsI | PMI1846 | iscS | iscR | acnB |
| lpdA | aceF | ace | lpxC | ftsZ | ftsA | ftsQ | PMI2068 |
| murC | mraZ | fold | ppiB | PMI2252 | fabZ | lpxD | yaeT |
| ecfE | uppS | pyrH | tsf | rpsB | PMI2361 | dnaG | rpoD |
| deoC | PMI2417 | hyfD | hyfC | hyfB | hyfA | PMI2531 | groL |
| groS | fixC | caiT | PMI2717 | PMI2719 | PMI2720 | PMI2721 | PMI2722 |
| potA | PMI2745 | uvrA | ssb | lexA | dgkA | plsB | PMI2770 |
| PMI2772 | rpoC | rpoB | rplL | rplJ | rplA | rplK | nusG |
| secE | fusA | rpsL | PMI2796 | slyD | PMI2804 | kefB | kefG |
| gmk | spoT | envZ | pstS | glpG | glpD | PMI2937 | PMI2938 |
| PMI2940 | PMI2941 | prlC | damX | gidA | atpI | atpB | atpF |
| atpH | atpA | atpG | atpD | atpC | glmU | fdhD | trmE |
| oxaA | rnpA | dnaA | recF | gyrB | rpmB | rpmG | rimO |
| PMI3182 | secB | hslV | ftsN | rpmE | argC | murI | coaA |
| bfd | bfr | rplC | rplD | rplV | rplP | rpsQ | rplX |
| rpsN | rplF | rplR | rpsE | rpmD | secY | rpmJ | rpsM |
| rpoA | hdfR | PMI3296 | ilvL | ilvG | trxA | rffT | rffM |
| hemX | cyaY | PMI3335 | miaA | hflX | hflK | PMI3369 | purA |
| rpsF | priB | rplI | argR | PMI3402 | ispB | rplU | rpmA |
| obgE | PMI3410 | rrmJ | ftsH | glmM | PMI3416 | nusA | infB |
| pnp | nlpI | deaD | PMI3465 | ivbL | ilvB | nark | frdC |
| frdB | frdA | poxA | ftsY | dusB | accB | aroQ | PMI3637 |
| tldD | PMI3641 | tldE | ptsN | rplM | diaA | PMI3691 | PMI3692 |
| PMI3693 | PMI3694 | cyoB | nuoM | zipA | dnaG | hyfF | murA |

TABLE 13a
List of genes

| | | | | | | | |
|---|---|---|---|---|---|---|---|
| zipA | secG | cyoC | pykF | flhB | dedA | crr | murF |
| gmhB | purH | PMI2939 | fdoG | PMI3715 | gpmB | dnaK | nhaA |
| ribF | ileS | carA | hyb0 | hybA | hybB | hybD | cpdB |
| yajC | secD | secF | dxs | cyoE | cyoD | cyoB | tig |
| dnaG | priC | dnaX | PMI0140 | recR | dksA | dksA | pyrG |
| eno | epd | fbaA | PMI0341 | nqrC | rimM | trmD | rplS |
| PMI0392 | lipA | lipB | corC | miaB | ubiF | gltA | sdhC |
| sdhA | sdhB | sucA | sucB | sucC | PMI0580 | tolQ | tolB |
| pal | PMI0586 | gpmA | PMI0648 | clpA | serS | pflA | pflB |
| rpsA | aspC | ompF | asnC | pncB | rlmL | ompA | PMI0855 |
| PMI0856 | rpmF | plsX | fabH | fabG | fabF | lolC | PMI1014 |
| proQ | thrS | rpmI | rplT | pheS | pheT | prsA | ipk |
| prfA | hemK | znuA | pykA | fumC | nth | rnb | tyrS |
| gapA | pgsA | uvrC | guaB | xseA | dapA | upp | purM |
| PMI1580 | fliZ | fliA | fliG | fliK | fliL | fliN | flgB |
| flhA | cheY | cheB | cheR | PMI1665 | PMI1666 | motB | murA |
| nrdB | yfbB | nuoM | nuoL | nuoK | nuoJ | nuoI | nuoH |
| nuoG | nuoF | nuoE | nuoC | nuoA | PMI1763 | PMI1767 | ackA |
| purF | cvpA | fabB | ptsI | PMI1846 | iscS | iscR | acnB |
| lpdA | aceF | ace | lpxC | ftsZ | ftsA | ftsQ | PMI2068 |
| murC | mraZ | fold | ppiB | PMI2252 | fabZ | lpxD | yaeT |
| ecfE | uppS | pyrH | tsf | rpsB | PMI2361 | dnaG | rpoD |
| deoC | PMI2417 | hyfD | hyfC | hyfB | hyfA | PMI2531 | groL |
| groS | fixC | caiT | PMI2717 | PMI2719 | PMI2720 | PMI2721 | PMI2722 |
| potA | PMI2745 | uvrA | ssb | lexA | dgkA | plsB | PMI2770 |
| PMI2772 | rpoC | rpoB | rplL | rplJ | rplA | rplK | nusG |
| secE | fusA | rpsL | PMI2796 | slyD | PMI2804 | kefB | kefG |
| gmk | spoT | envZ | pstS | glpG | glpD | PMI2937 | PMI2938 |
| PMI2940 | PMI2941 | prlC | damX | gidA | atpI | atpB | atpF |
| atpH | atpA | atpG | atpD | atpC | glmU | fdhD | trmE |
| oxaA | rnpA | dnaA | recF | hyfF | rpmB | rpmG | rimO |
| PMI3182 | secB | hslV | ftsN | rpmE | argC | murI | coaA |
| bfd | bfr | rplC | rplD | rplV | rplP | rpsQ | rplX |
| rpsN | rplF | rplR | rpsE | rpmD | secY | rpmJ | rpsM |
| rpoA | hdfR | PMI3296 | ilvL | ilvG | trxA | rffT | rffM |
| hemX | cyaY | PMI3335 | miaA | hflX | hflK | PMI3369 | purA |
| rpsF | priB | rplI | argR | PMI3402 | ispB | rplU | rpmA |
| obgE | PMI3410 | rrmJ | ftsH | glmM | PMI3416 | nusA | infB |
| pnp | nlpI | deaD | PMI3465 | ivbL | ilvB | nark | frdC |
| frdB | frdA | poxA | ftsY | dusB | accB | aroQ | PMI3637 |
| tldD | PMI3641 | tldE | ptsN | rplM | diaA | PMI3691 | PMI3692 |
| PMI3693 | PMI3694 | cyoB | nuoM | | | | |

[0181] According to certain embodiments of the twenty-second, twenty-third, and/or twenty-fourth aspect, at least one of the following gene positions, preferably at least two, three, four, five, six, seven, eight, nine or more gene positions, is/are determined: 2562578, 3741905, 131826, 1482764, 1771087, 1771119, 1918241, 1968294, 2238063, 2238072, 2238088, 2238090, 2454709, 3039125, 3221491, 3221494, 3422635, 4059624, 4059634, 4060202, 131835, 19958, 21872, 25572, 25764, 25783, 26206, 26284, 32335, 32353, 53405, 53487, 53505, 53661, 53871, 54003, 54004, 54213, 54276, 54303, 54468, 54605, 55215, 55677, 55735, 56361, 56639, 58576, 58578, 68312, 105758, 106230, 106253, 107791, 122332, 131111, 131404, 131446, 132270, 132397, 141518, 141519, 142045, 142682, 165937, 166053, 166099, 166157, 166159, 166167, 166180, 171360, 171546, 171658, 171662, 174515, 174869, 175036, 236145, 236466, 262760, 263053, 289363, 291016, 291155, 291404, 390045, 390048, 404430, 438564, 438569, 438583, 438625, 438977, 439953, 447813, 488253, 488635, 489064, 512855, 515772, 516200, 609454, 609606, 610448, 610581, 610582, 610593, 610594, 612627, 612638, 612639, 612694, 612843, 613447, 613821, 613863, 613937, 613949, 614135, 614251, 616159, 616177, 616207, 616215, 616221, 616298, 616300, 616305, 616353, 616661, 616780, 616841, 616890, 616939, 617048, 618013, 618168, 628162, 628863, 631669, 631775, 632026, 632027, 632122, 632126, 632133, 632140, 632142, 632197, 632399, 632442, 632560, 632720, 637570, 704521, 749216, 764862, 764899, 764902, 764903, 764904, 764954, 769675, 771332, 771477, 771623, 771729, 771731, 784768, 785214, 785336, 848303, 849825, 851231, 852902, 860929, 873905, 947084, 947158, 947163, 947167, 947173, 947182, 947210, 947236, 947252, 947254, 947296, 947564, 947656, 947738, 947807, 947816, 947821, 947926, 947927, 947928, 948092, 948099, 948576, 948742, 949052, 949151, 949185, 949189, 949198, 949339, 949415, 949416, 949441, 949454, 949458, 949467, 949474, 949544, 949559, 949663, 951242, 951244, 951248, 951254, 951360, 951854, 951902, 952495, 952747, 952828, 952836, 968923, 1077386, 1077419, 1077468, 1077618, 1077724, 1078112, 1100144, 1100989, 1101393, 1101438, 1101919, 1101980, 1101994, 1104454, 1104820, 1104839, 1104869, 1105039, 1105097, 1105100, 1146632, 1146937, 1147549, 1147625, 1147626, 1147771, 1150615, 1150731, 1152456, 1212590, 1212620, 1212736, 1212743, 1212788, 1217061, 1371149, 1385767, 1385770, 1385787, 1386122, 1386278, 1464863, 1464864, 1464866, 1464868, 1465085, 1482775, 1596063, 1596215, 1596441, 1614151, 1614206, 1614352, 1614378, 1614858, 1615063, 1615065, 1615072, 1640778, 1640933, 1640990, 1641451, 1662486, 1673731, 1673848, 1674401, 1680613, 1731860, 1732817, 1732858, 1745743, 1748563, 1749691, 1749694, 1749702, 1749817, 1749878, 1750174, 1750252, 1750255, 1750318, 1750335, 1750351, 1750378, 1750387, 1750467, 1750477, 1750489, 1750499, 1750500, 1750515, 1750516, 1751645, 1764702, 1770887, 1771129, 1771251, 1771265, 1771266, 1773358, 1773359, 1773362, 1773396, 1773580, 1773746, 1775351, 1777128, 1777130, 1777396, 1777408, 1777703, 1782242, 1853651, 1853822, 1857896, 1866823, 1875173, 1875189, 1875301, 1876427, 1876529, 1876536, 1876822, 1876979, 1876980, 1876981, 1876996, 1877004, 1877005, 1878333, 1878585, 1878600, 1878732, 1878856, 1879024, 1879091, 1879137, 1879282, 1879349, 1879919, 1880000, 1880555, 1880557, 1881003, 1881096, 1881108, 1881129, 1881144, 1881154, 1881155, 1881168, 1881171, 1883439, 1883753, 1883897, 1883933, 1883937, 1884932, 1885231, 1885531, 1885549, 1885601, 1887186, 1887195, 1887200, 1887371, 1888236, 1888332, 1888582, 1888605, 1888971, 1894922, 1897741, 1914231, 1914232, 1914319, 1914381, 1914385, 1914632, 1925721, 1967765, 1967784, 1983874, 2000892, 2002419, 2183724, 2199454, 2200254, 2200493, 2200898, 2201059, 2201120, 2201122, 2201708, 2202174, 2202175, 2202457, 2202981, 2203212, 2203250, 2203904, 2203927, 2203955, 2205132, 2205184, 2227683, 2228236, 2229346, 2229439, 2229621, 2229622, 2229648, 2230617, 2230750, 2230836, 2230874, 2231569, 2231570, 2231571, 2231581, 2231794, 238100, 2243936, 2335800, 2340329, 2442677, 2442685, 2472332, 2473402, 2476250, 2476332, 2476597, 2476603, 2476615, 2476742, 2478782, 2478897, 2481987, 2482024, 2482224, 2482760, 2482761, 2482867, 2483098, 2483108, 2483232, 2483791, 2581759, 2590008, 2590377, 2592098, 2644614, 2644726, 2644737, 2769143, 2769146, 2769209, 2769248, 2769288, 2772170, 2772179, 2772279, 2772642, 2775062, 2775162, 2775272, 2786911, 2786926, 2787314, 2787433, 2787446, 2787447, 2787827, 2787951, 2788142, 2788300, 2788384, 2788451, 2788539, 2788541, 2788586, 2898978, 2904023, 2968996, 2969025, 2969694, 2969753, 2969784, 2969798, 2971794, 2971795, 2971796, 2971797, 2971798, 2971959, 2972346, 2972726, 2988736, 2988934, 3000293, 3000434, 3003519, 3003544, 3003546, 3004546, 3004697, 3006261, 3006611, 3006612, 3006613, 3006627, 3006658, 3006708, 3006709, 3006715, 3006791, 3006810, 3006832, 3006847, 3006902, 3006904, 3006910, 3007284, 3007321, 3007477, 3041804, 3041820, 3041823, 3042357, 3042468, 3055027, 3055162, 3055257, 3055258, 3055273, 3055564, 3058839, 3058882, 3059496, 3059509, 3059675, 3059676, 3059963, 3060607, 3060792, 3060994, 3061157, 3061158, 3061179, 3061620, 3062379, 3062488, 3062683, 3062701, 3062723, 3062866, 3062945, 3063015, 3063544, 3064080, 3064098, 3064099, 3064103, 3064277, 3064283, 3065011, 3065028, 3065306, 3065502, 3065511, 3065512, 3065580, 3067456, 3067463, 3067493, 3067563, 3067579, 3067693, 3067720, 3067731, 3067732, 3067739, 3067798, 3067942, 3068551, 3069985, 3070082, 3070525, 3070560, 3070598, 3070599, 3070610, 3070624, 3070666, 3070672, 3070699, 3075527, 3075770, 3075960, 3076139, 3076150, 3076157, 3076168, 3076170, 3078449, 3078450, 3140400, 3140993, 3141038, 3173976, 3173988, 3173997, 3174309, 3174402, 3174403, 3174429, 3174528, 3174529, 3174532, 3174594, 3174618, 3174619, 3174632, 3210333, 3210381, 3210582, 3210583, 3211688, 3211694, 3211774, 3220249, 3220312, 3220529, 3220580, 3220803, 3220811, 3220832, 3220880, 3220883, 3220965, 3221159, 3221172, 3221380, 3221587, 3221611, 3223265, 3225405, 3225451, 3225529, 3299712, 3299749, 3326024, 3358602, 3361509, 3361588, 3361606, 3361612, 3361614, 3361621, 3361871, 3361872, 3361937, 3361992, 3361994, 3362009, 3362011, 3362031, 3362078, 3362345, 3362393, 3363067, 3363185, 3363326, 3363663, 3363684, 3363730, 3363803, 3363969, 3364748, 3364941, 3364955, 3364959, 3364963, 3365950, 3365960, 3365994, 3366006, 3366059, 3366266, 3366827, 3366832, 3367976, 3367999, 3368000, 3368115, 3368631, 3421606, 3422011, 3422089, 3422272, 3422315, 3422593, 3422660, 3422746, 3422758, 3422800, 3422827, 3422947, 3422998, 3423002, 3423301, 3423314, 3423339, 3423347, 3423349, 3423479, 3423571, 3423572, 3423593, 3423641, 3442266, 3442411, 3442455, 3442482, 3442995, 3443468, 3443474, 3443514, 3443600, 3443627, 3443740, 3443741, 3443807, 3443816, 3443933, 3443937, 3443945, 3443948, 3443951, 3443952, 3443954, 3444678, 3444693, 3444702, 3446029, 3446261, 3446713, 3446933, 3448971, 3448972, 3448991, 3449040, 3449042, 3449052, 3449075, 3449081, 3449123, 3449280, 3449348, 3449349, 3449403, 3449612, 3449698, 3449885, 3449889, 3449925, 3449970, 3450028, 3450545, 3450640, 3470490, 3470647, 3470648, 3496360, 3496871, 3496900, 3497196, 3497557, 3497558, 3497560, 3530618, 3530628, 3530903, 3531614, 3531625, 3531774, 3531804, 3535639, 3557063, 3557092, 3557151, 3568751, 3568760, 3568840, 3568944, 3568978, 3578816, 3578860, 3578891, 3581355, 3581400, 3581673, 3581980, 3582010, 3582844, 3583192, 3583558, 3583833, 3585451, 3585537, 3585546, 3586561, 3586562, 3586567, 3586831, 3586849, 3587263, 3587297, 3587299, 3588101, 3588942, 3589709, 3589828, 3589840, 3589862, 3589930, 3590344, 3590345, 3590700, 3590900, 3591026, 3591624, 3591647, 3593035, 3593310, 3593315, 3595160, 3595163, 3595208, 3612449, 3612512, 3612769, 3612829, 3612890, 3612907, 3612935, 3613063, 3613446, 3613509, 3615780, 3615990, 3632585, 3632588, 3632597, 3632608, 3644924, 3645043, 3647693, 3647816, 3647822, 3647885, 3647911, 3652470, 3658169, 3658352, 3692300, 3692462, 3692463, 3692464, 3692465, 3692477, 3694213, 3694436, 3696887, 3696968, 3696971, 3697375, 3703133, 3703141, 3703214, 3703248, 3703310, 3703384, 3703388, 3704011, 3704123, 3727857, 3727858, 3730091, 3731610, 3732055, 3732064, 3732455, 3732867, 3736431, 3736432, 3737164, 3737782, 3741525, 3741540, 3741553, 3741562, 3741571, 3742055, 3742803, 3742837, 3742916, 3742967, 3743001, 3743006, 3743365, 3743369, 3743419, 3743430, 3743434, 3743435, 3743436, 3743453, 3743622, 3743713, 3743794, 3743802, 3744367, 3744368, 3744390, 3744402, 3744517, 3744612, 3744870, 3744951, 3745026, 3745062, 3745264, 3745279, 3745282, 3745433, 3745437, 3745460, 3749482, 3749941, 3749942, 3752300, 3752306, 3752575, 3752583, 3752605, 3753216, 3793195, 3838549, 3838757, 3838877, 3838879, 3838939, 3899203, 3917376, 3917431, 3918057, 3918248, 3918273, 3918304, 3918459, 3918870, 3921420, 3921481, 3942358, 3943893, 3944031, 3960166, 3960289, 3960435, 3960436, 3960447, 3960448, 3960566, 3960569, 3960577, 3960778, 3965450, 3965463, 3965465, 3965787, 3965944, 3966152, 3966202, 3966203, 3966226, 3977953, 3978005, 3980725, 3980737, 3980791, 3980810, 3980884, 3981160, 3981182, 3984702, 3984759, 3984780, 4005175, 4005457, 4029846, 4030230, 4030296, 4030298, 4030314, 4030336, 4030378, 4030434, 4030446, 4030541, 4032086, 4032192, 4032215, 4032242, 4032245, 4032266, 4032293, 4032332, 4032335, 4032343, 4032365, 4032713, 4032870, 4033003, 4033006, 4033170, 4033178, 4033231, 4033240, 4033241, 4033242, 4033245, 4033249, 4033255, 4033359, 4033382, 4033392, 4033958, 4034032, 4034039, 4034044, 4034054, 4034064, 4034069, 4034095, 4034111, 4034132, 4034134, 4034139, 4034147, 4034167, 4034192, 4034231, 4034237, 4034261, 4060077, 4060130, 4060144, 4060163, 4060171, 4060243, 132508, 1875294, 1963153, 2590425, 2766897, 3995229.

### EXAMPLES

[0182] The present invention will now be described in detail with reference to several examples thereof. However, these examples are illustrative and do not limit the scope of the invention.

### Example 1

[0183] Whole genome sequencing was carried out in addition to classical antimicrobial susceptibility testing of the same isolates for a cohort of 583 specimens of Proteus species, particularly Proteus mirabilis, Proteus penneri and Proteus vulgaris. This allowed performing genome wide correlation studies to find genetic variants (e.g. point mutations, small insertions and deletion, larger structural variants, plasmid copy number gains, gene dosage effects) in the genome and plasmids that are significantly correlated to the resistance against one or several drugs. The approach also allows for comparing the relevant sites in the genome to each other.

[0184] In the approach the different sources of genetic resistance as well as the different ways of how bacteria can become resistant were covered. By measuring clinical isolates collected in a broad geographical area and across a broad time span of three decades a complete picture going far beyond the rather artificial step of laboratory generated resistance mechanisms was tried to be generated.

[0185] To this end, a set of 21 clinically relevant antimicrobial agents with 5 different modes of action was put together, and the minimally inhibitory concentration (MIC) of the 21 drugs for the Proteus isolates was measured.

[0186] The detailed procedure is given in the following:

[0187] Bacterial Strains

[0188] The inventors selected 583 Proteus strains from the microbiology strain collection at Siemens Healthcare Diagnostics (West Sacramento, Calif.) for susceptibility testing and whole genome sequencing.

[0189] Antimicrobial Susceptibility Testing (AST) Panels

[0190] Frozen reference AST panels were prepared following Clinical Laboratory Standards Institute (CLSI) recommendations. The following antimicrobial agents (with μg/ml concentrations shown in parentheses) were included in the panels: Amoxicillin/K Clavulanate (0.5/0.25-64/32), Ampicillin (0.25-128), Ampicillin/Sulbactam (0.5/0.25-64/32), Aztreonam (0.25-64), Cefazolin (0.5-32), Cefepime (0.25-64), Cefotaxime (0.25-128), Ceftazidime (0.25-64), Ceftriaxone (0.25-128), Cefuroxime (1-64), Cephalothin (1-64), Ciprofloxacin (0.015-8), Ertepenem (0.12-32), Gentamicin (0.12-32), Imipenem (0.25-32), Levofloxacin (0.25-16), Meropenem (0.12-32), Piperacillin/Tazobactam (0.25/4-256/4), Tetracycline (0.5-64), Tobramycin (0.12-32), and Trimethoprim/Sulfamethoxazole (0.25/4.7-32/608). Prior to use with clinical isolates, AST panels were tested with QC strains. AST panels were considered acceptable for testing with clinical isolates when the QC results met QC ranges described by CLSI16.

[0191] Inoculum Preparation

[0192] Isolates were cultured on trypticase soy agar with 5% sheep blood (BBL, Cockeysville, Md.) and incubated in ambient air at 35±1° C. for 18-24 h. Isolated colonies (4-5 large colonies or 5-10 small colonies) were transferred to a 3 ml Sterile Inoculum Water (Siemens) and emulsified to a final turbidity of a 0.5 McFarland standard. 2 ml of this suspension was added to 25 ml Inoculum Water with Pluronic-F (Siemens). Using the Inoculator (Siemens) specific for frozen AST panels, 5 μl of the cell suspension was transferred to each well of the AST panel. The inoculated AST panels were incubated in ambient air at 35±1° C. for 16-20 h. Panel results were read visually, and minimal inhibitory concentrations (MIC) were determined.

[0193] DNA Extraction

[0194] Four streaks of each Gram-negative bacterial isolate cultured on trypticase soy agar containing 5% sheep blood and cell suspensions were made in sterile 1.5 ml collection tubes containing 50 μl Nuclease-Free Water (AM9930, Life Technologies). Bacterial isolate samples were stored at −20° C. until nucleic acid extraction. The Tissue Preparation System (TPS) (096D0382-02 01 B, Siemens) and the VERSANT® Tissue Preparation Reagents (TPR) kit (10632404B, Siemens) were used to extract DNA from these bacterial isolates. Prior to extraction, the bacterial isolates were thawed at room temperature and were pelleted at 2000 G for 5 seconds. The DNA extraction protocol DNAext was used for complete total nucleic acid extraction of 48 isolate samples and eluates, 50 μl each, in 4 hours. The total nucleic acid eluates were then transferred into 96-Well qPCR Detection Plates (401341, Agilent Technologies) for RNase A digestion, DNA quantitation, and plate DNA concentration standardization processes. RNase A (AM2271, Life Technologies) which was diluted in nuclease-free water following manufacturer's instructions was added to 50 μl of the total nucleic acid eluate for a final working concentration of 20 μg/ml. Digestion enzyme and eluate mixture were incubated at 37° C. for 30 minutes using Siemens VERSANT® Amplification and Detection instrument. DNA from the RNase digested eluate was quantitated using the Quant-iT™ PicoGreen dsDNA Assay (P11496, Life Technologies) following the assay kit instruction, and fluorescence was determined on the Siemens VERSANT® Amplification and Detection instrument. Data analysis was performed using Microsoft® Excel 2007. 25 μl of the quantitated DNA eluates were transferred into a new 96-Well PCR plate for plate DNA concentration standardization prior to library preparation. Elution buffer from the TPR kit was used to adjust DNA concentration. The standardized DNA eluate plate was then stored at −80° C. until library preparation.

[0195] Next Generation Sequencing

[0196] Prior to library preparation, quality control of isolated bacterial DNA was conducted using a Qubit 2.0 Fluorometer (Qubit dsDNA BR Assay Kit, Life Technologies) and an Agilent 2200 TapeStation (Genomic DNA ScreenTape, Agilent Technologies). NGS libraries were prepared in 96 well format using NexteraXT DNA Sample Preparation Kit and NexteraXT Index Kit for 96 Indexes (Illumina) according to the manufacturer's protocol. The resulting sequencing libraries were quantified in a qPCR-based approach using the KAPA SYBR FAST qPCR MasterMix Kit (Peqlab) on a ViiA 7 real time PCR system (Life Technologies). 96 samples were pooled per lane for paired-end sequencing (2×100 bp) on Illumina Hiseq2000 or Hiseq2500 sequencers using TruSeq PE Cluster v3 and TruSeq SBS v3 sequncing chemistry (Illumina). Basic sequencing quality parameters were determined using the FastQC quality control tool for high throughput sequence data (Babraham Bioinformatics Institute).

[0197] Data Analysis

[0198] Raw paired-end sequencing data for the 583 Proteus samples were mapped against the Proteus reference (NC_010554) with BWA 0.6.1.20. The resulting SAM files were sorted, converted to BAM files, and PCR duplicates were marked using the Picard tools package 1.104 (http://picard.sourceforge.net/). The Genome Analysis Toolkit 3.1.1 (GATK)21 was used to call SNPs and indels for blocks of 200 Proteus samples (parameters: -ploidy 1 −glm BOTH −stand_call_conf 30 −stand_emit_conf 10). VCF files were combined into a single file and quality filtering for SNPs was carried out (QD<2.0 ∥ FS>60.0 ∥ MQ<40.0) and indels (QD<2.0 ∥ FS>200.0). Detected variants were annotated with SnpEff22 to predict coding effects. For each annotated position, genotypes of all Proteus samples were considered. Proteus samples were split into two groups, low resistance group (having lower MIC concentration for the considered drug), and high resistance group (having higher MIC concentrations) with respect to a certain MIC concentration (breakpoint). To find the best breakpoint all thresholds were evaluated and p-values were computed with Fisher's exact test relying on a 2×2 contingency table (number of Proteus samples having the reference or variant genotype vs. number of samples belonging to the low and high resistance group). The best computed breakpoint was the threshold yielding the lowest p-value for a certain genomic position and drug. For further analyses positions with non-synonymous alterations and p-value<10⁻¹⁰ were considered.

[0199] Since a potential reason for drug resistance is gene duplication, gene dose dependency was evaluated. For each sample the genomic coverage for each position was determined using BED Tools. Gene ranges were extracted from the reference assembly NC_010554.gff and the normalized median coverage per gene was calculated. To compare low- and high-resistance isolates the best area under the curve (AUC) value was computed. Groups of at least 20% of all samples having a median coverage larger than zero for that gene and containing more than 15 samples per group were considered in order to exclude artifacts and cases with AUC>0.75 were further evaluated.

[0200] To include data on the different ways how resistance mechanisms are acquired Proteus isolates collected over more than three decades were analyzed such that also horizontal gene transfer could potentially be discovered.

[0201] In detail, the following steps were carried out:

[0202] Proteus strains to be tested were seeded on agar plates and incubated under growth conditions for 24 hours. Then, colonies were picked and incubated in growth medium in the presence of a given antibiotic drug in dilution series under growth conditions for 16-20 hours. Bacterial growth was determined by observing turbidity.

[0203] Next mutations were searched that are highly correlated with the results of the phenotypic resistance test.

[0204] For sequencing, samples were prepared using a Nextera library preparation, followed by multiplexed sequencing using the Illuminat HiSeq 2500 system, paired end sequencing. Data were mapped with BWA (Li H. and Durbin R. (2010) Fast and accurate long-read alignment with Burrows-Wheeler Transform. Bioinformatics, Epub. [PMID: 20080505]) and SNP were called using samtools (Li H.*, Handsaker B.*, Wysoker A., Fennell T., Ruan J., Homer N., Marth G., Abecasis G., Durbin R. and 1000 Genome Project Data Processing Subgroup (2009) The Sequence alignment/map (SAM) format and SAMtools. Bioinformatics, 25, 2078-9. [PMID: 19505943]).

[0205] As reference genome, NC_010554 as annotated at the NCBI was determined as best suited.

[0206] The mutations were matched to the genes and the amino acid changes were calculated. Using different algorithms (SVM, homology modeling) mutations leading to amino acid changes with likely pathogenicity/resistance were calculated.

[0207] In total, whole genomes and plasmids of 583 different clinical isolates of Proteus species were sequenced, and classical antimicrobial susceptibility testing (AST) against 21 therapy forms as described above was performed for all organisms. From the classical AST a table with 583 rows (isolates) and 21 columns (MIC values for 21 drugs) was obtained. Each table entry contained the MIC for the respective isolate and the respective drug. The genetic data were mapped to different reference genomes of Proteus that have been annotated at the NCBI (http://www.ncbi.nlm.nih.gov/), and the best reference was chosen as template for the alignment—NC_010554 as annotated at the NCBI. Additionally, assemblies were carried out and it was verified that the sequenced genomes fulfil all quality criteria to become reference genomes.

[0208] Next, genetic variants were evaluated. This approach resulted in a table with the genetic sites in columns and the same isolates in 583 rows. Each table entry contained the genetic determinant at the respective site (A, C, T, G, small insertions and deletions, . . . ) for the respective isolate.

[0209] In a next step different statistical tests were carried out
[0210] 1) For comparing resistance/susceptibility to genetic sites we calculated contingency tables and determined the significance using Fishers test
[0211] 2) For comparing different sites to each other we calculated the correlation between different genetic sites
[0212] 3) For detecting gene dosage effects, e.g. loss or gain of genes (in the genome or on plasmids) we calculated the coverage (i.e. how many read map to the current position) at each site for resistant and not resistant isolates.

[0213] From the data, first the 21 genes with the best p-value were chosen for the list of mutations as well as the list of correlated antibiotic resistance, representing Tables 1 and 2. As for a lot of genes the p-values were very low, also the next p-values up to 1.04565E-62 were considered, leading to the genes in Table 13 and Table 13a, respectively the gene positions disclosed with regard to the 22^{nd}, 23^{rd} and/or 24^{th} aspect.

[0214] A full list of all genetic sites, drugs, drug classes, affected genes etc. is provided in Tables 3 and 4a, 4b and 4c, wherein Table 3 corresponds to Table 1 and represents the genes having the lowest p-values after determining mutations in the genes, and Table 4, respectively Tables 4a, 4b and 4c correspond to Table 2 and represent the genes having the lowest p-values after correlating the mutations with antibiotic resistance for the respective antibiotics.

[0215] In addition, the data with the best p-values for each antibiotic class with the most antibiotic drugs, as well as each antibiotic, respectively, were evaluated, being disclosed in Tables 5-10.

[0216] In Tables 3-10 the columns are designated as follows:

Gene name: affected gene;
POS: genomic position of the SNP/variant in the Proteus reference genome (see above);
p-value: significance value calculated using Fishers exact test (determined according to FDR (Benjamini Hochberg) method (Benjamini Hochberg, 1995));
genbank protein accession number: (NCBI) Accession number of the corresponding protein of the genes

TABLE 3
Detailed results for the genes in Example 1 (corresponding to Table 1)

| | | #drug | | | genbank protein |
|---|---|---|---|---|---|
| POS | drug class | classes | p-value | gene name | accession number |
| 2562578 | other (benzene derived)/sulfonamide; amino- | 4 | 4.65979E−71 | parC | YP_002152062.1 |
| | glycoside; fluoroquinolone; Lactams | | | | |
| 3741905 | fluoroquinolone; polyketide*; Lactams | 3 | 5.11728E−63 | secG | YP_002153099.1 |
| 131826 | fluoroquinolone; polyketide*; Lactams | 3 | 7.38724E−63 | cyoC | YP_002149890.1 |
| 1482764 | fluoroquinolone; polyketide*; Lactams | 3 | 7.38724E−63 | pykF | YP_002151136.1 |
| 1771087 | fluoroquinolone; polyketide*; Lactams | 3 | 7.38724E−63 | flhB | YP_002151391.1 |
| 1771119 | fluoroquinolone; polyketide*; Lactams | 3 | 7.38724E−63 | flhB | YP_002151391.1 |
| 1918241 | fluoroquinolone; polyketide*; Lactams | 3 | 7.38724E−63 | dedA | YP_002151518.1 |
| 1968294 | fluoroquinolone; polyketide*; Lactams | 3 | 7.38724E−63 | crr | YP_002151557.1 |
| 2238063 | fluoroquinolone; polyketide*; Lactams | 3 | 7.38724E−63 | murF | YP_002151793.1 |
| 2238072 | fluoroquinolone; polyketide*; Lactams | 3 | 7.38724E−63 | murF | YP_002151793.1 |
| 2238088 | fluoroquinolone; polyketide*; Lactams | 3 | 7.38724E−63 | murF | YP_002151793.1 |
| 2238090 | fluoroquinolone; polyketide*; Lactams | 3 | 7.38724E−63 | murF | YP_002151793.1 |
| 2454709 | fluoroquinolone; polyketide*; Lactams | 3 | 7.38724E−63 | gmhB | YP_002151976.1 |
| 3039125 | fluoroquinolone; polyketide*; Lactams | 3 | 7.38724E−63 | purH | YP_002152469.1 |
| 3221491 | fluoroquinolone; polyketide*; Lactams | 3 | 7.38724E−63 | PMI2939 | YP_002152640.1 |
| 3221494 | fluoroquinolone; polyketide*; Lactams | 3 | 7.38724E−63 | PMI2939 | YP_002152640.1 |
| 3422635 | other (benzene derived)/sulfonamide; | 4 | 7.38724E−63 | fdoG | YP_002152801.1 |
| | polyketide*; fluoroquinolone; Lactams | | | | |
| 4059624 | fluoroquinolone; polyketide*; Lactams | 3 | 7.38724E−63 | PMI3715 | YP_002153390.1 |
| 4059634 | fluoroquinolone; polyketide*; Lactams | 3 | 7.38724E−63 | PMI3715 | YP_002153390.1 |
| 4060202 | fluoroquinolone; polyketide*; Lactams | 3 | 7.38724E−63 | gpmB | YP_002153391.1 |
| 131835 | fluoroquinolone; polyketide*; Lactams | 3 | 8.38542E−63 | cyoC | YP_002149890.1 |

*(tetracycline)

TABLE 4a
Detailed results for the genes in Example 1 (corresponding to Table 2)

| | | | | #drug |
|---|---|---|---|---|
| POS | drug | #drugs | drug class | classes |
| 2562578 | CF; T/S; CP; CFT; GM; CFZ; CRM; CAX; CPE; AM; A/S; | 13 | other (benzene derived)/sulfonamide; | 4 |
| | LVX; AUG | | aminoglycoside; fluoroquinolone; Lactams | |
| 3741905 | CF; TE; CFT; CFZ; CRM; CP; CAX; LVX; AM; A/S; AUG | 11 | fluoroquinolone; polyketide*; Lactams | 3 |
| 131826 | CF; TE; CFT; CFZ; CRM; CP; CAX; LVX; AM; A/S; AUG | 11 | fluoroquinolone; polyketide*; Lactams | 3 |
| 1482764 | CF; TE; CFT; CFZ; CRM; CP; CAX; LVX; AM; A/S; AUG | 11 | fluoroquinolone; polyketide*; Lactams | 3 |
| 1771087 | CF; TE; CFT; CFZ; CRM; CP; CAX; LVX; AM; A/S; AUG | 11 | fluoroquinolone; polyketide*; Lactams | 3 |
| 1771119 | CF; TE; CFT; CFZ; CRM; CP; CAX; LVX; AM; A/S; AUG | 11 | fluoroquinolone; polyketide*; Lactams | 3 |
| 1918241 | CF; TE; CFT; CFZ; CRM; CP; CAX; LVX; AM; A/S; AUG | 11 | fluoroquinolone; polyketide*; Lactams | 3 |
| 1968294 | CF; TE; CFT; CFZ; CRM; CP; CAX; LVX; AM; A/S; AUG | 11 | fluoroquinolone; polyketide*; Lactams | 3 |
| 2238063 | CF; TE; CFT; CFZ; CRM; CP; CAX; LVX; AM; A/S; AUG | 11 | fluoroquinolone; polyketide*; Lactams | 3 |
| 2238072 | CF; TE; CFT; CFZ; CRM; CP; CAX; LVX; AM; A/S; AUG | 11 | fluoroquinolone; polyketide*; Lactams | 3 |
| 2238088 | CF; TE; CFT; CFZ; CRM; CP; CAX; LVX; AM; A/S; AUG | 11 | fluoroquinolone; polyketide*; Lactams | 3 |
| 2238090 | CF; TE; CFT; CFZ; CRM; CP; CAX; LVX; AM; A/S; AUG | 11 | fluoroquinolone; polyketide*; Lactams | 3 |
| 2454709 | CF; TE; CFZ; CRM; CP; CAX; LVX; AM; A/S; AUG | 10 | fluoroquinolone; polyketide*; Lactams | 3 |
| 3039125 | CF; TE; CFZ; CRM; CP; CAX; LVX; AM; A/S; AUG | 10 | fluoroquinolone; polyketide*; Lactams | 3 |
| 3221491 | CF; TE; CFT; CFZ; CRM; CP; CAX; LVX; AM; A/S; AUG | 11 | fluoroquinolone; polyketide*; Lactams | 3 |
| 3221494 | CF; TE; CFT; CFZ; CRM; CP; CAX; LVX; AM; A/S; AUG | 11 | fluoroquinolone; polyketide*; Lactams | 3 |
| 3422635 | CF; T/S; TE; CFZ; CRM; CP; CAX; LVX; AM; A/S; AUG | 11 | other (benzene derived)/sulfonamide; | 4 |
| | | | polyketide*; fluoroquinolone; Lactams | |
| 4059624 | CF; TE; CFT; CFZ; CRM; CP; CAX; LVX; AM; A/S; AUG | 11 | fluoroquinolone; polyketide*; Lactams | 3 |
| 4059634 | CF; TE; CFT; CFZ; CRM; CP; CAX; LVX; AM; A/S; AUG | 11 | fluoroquinolone; polyketide*; Lactams | 3 |
| 4060202 | CF; TE; CFT; CFZ; CRM; CP; CAX; LVX; AM; A/S; AUG | 11 | fluoroquinolone; polyketide*; Lactams | 3 |
| 131835 | CF; TE; CFT; CFZ; CRM; CP; CAX; LVX; AM; A/S; AUG | 11 | fluoroquinolone; polyketide*; Lactams | 3 |

*(tetracycline)

TABLE 4b
Detailed results for the genes in Example 1 (corresponding to Table 2, continued)

| | | | | | #significant | #significant |
|---|---|---|---|---|---|---|
| | best | #significant | #significant | #significant | polyketide | other (benzene |
| POS | drug | Lactams | fluoroquinolones | aminoglycosides | (tetracycline) | derived)/sulfonamide |
| 2562578 | CP | 9 | 2 | 1 | 0 | 1 |
| 3741905 | CFZ | 8 | 2 | 0 | 1 | 0 |
| 131826 | CFZ | 8 | 2 | 0 | 1 | 0 |
| 1482764 | CFZ | 8 | 2 | 0 | 1 | 0 |
| 1771087 | CFZ | 8 | 2 | 0 | 1 | 0 |
| 1771119 | CFZ | 8 | 2 | 0 | 1 | 0 |
| 1918241 | CFZ | 8 | 2 | 0 | 1 | 0 |
| 1968294 | CFZ | 8 | 2 | 0 | 1 | 0 |
| 2238063 | CFZ | 8 | 2 | 0 | 1 | 0 |
| 2238072 | CFZ | 8 | 2 | 0 | 1 | 0 |
| 2238088 | CFZ | 8 | 2 | 0 | 1 | 0 |
| 2238090 | CFZ | 8 | 2 | 0 | 1 | 0 |
| 2454709 | TE | 7 | 2 | 0 | 1 | 0 |
| 3039125 | TE | 7 | 2 | 0 | 1 | 0 |
| 3221491 | CFZ | 8 | 2 | 0 | 1 | 0 |
| 3221494 | CFZ | 8 | 2 | 0 | 1 | 0 |
| 3422635 | TE | 7 | 2 | 0 | 1 | 1 |
| 4059624 | CFZ | 8 | 2 | 0 | 1 | 0 |
| 4059634 | CFZ | 8 | 2 | 0 | 1 | 0 |
| 4060202 | CFZ | 8 | 2 | 0 | 1 | 0 |
| 131835 | CFZ | 8 | 2 | 0 | 1 | 0 |

TABLE 4c
Detailed results for the genes in Example 1
(corresponding to Table 2, continued)

| | | | genbank protein |
|---|---|---|---|
| POS | p-value | gene name | accession number |
| 2562578 | 4.65979E−71 | parC | YP_002152062.1 |
| 3741905 | 5.11728E−63 | secG | YP_002153099.1 |
| 131826 | 7.38724E−63 | cyoC | YP_002149890.1 |
| 1482764 | 7.38724E−63 | pykF | YP_002151136.1 |
| 1771087 | 7.38724E−63 | flhB | YP_002151391.1 |
| 1771119 | 7.38724E−63 | flhB | YP_002151391.1 |
| 1918241 | 7.38724E−63 | dedA | YP_002151518.1 |
| 1968294 | 7.38724E−63 | crr | YP_002151557.1 |
| 2238063 | 7.38724E−63 | murF | YP_002151793.1 |
| 2238072 | 7.38724E−63 | murF | YP_002151793.1 |
| 2238088 | 7.38724E−63 | murF | YP_002151793.1 |
| 2238090 | 7.38724E−63 | murF | YP_002151793.1 |
| 2454709 | 7.38724E−63 | gmhB | YP_002151976.1 |
| 3039125 | 7.38724E−63 | purH | YP_002152469.1 |
| 3221491 | 7.38724E−63 | PMI2939 | YP_002152640.1 |
| 3221494 | 7.38724E−63 | PMI2939 | YP_002152640.1 |
| 3422635 | 7.38724E−63 | fdoG | YP_002152801.1 |
| 4059624 | 7.38724E−63 | PMI3715 | YP_002153390.1 |
| 4059634 | 7.38724E−63 | PMI3715 | YP_002153390.1 |
| 4060202 | 7.38724E−63 | gpmB | YP_002153391.1 |
| 131835 | 8.38542E−63 | cyoC | YP_002149890.1 |

[0217] Also the antibiotic/drug classes, the number of significant antibiotics correlated to the mutations (over all antibiotics or over certain classes), as well as the correlated antibiotics are denoted in the Tables.

[0218] The p-value was calculated using the Fisher exact test based on contingency table with 4 fields: # samples Resistant/wild type; # samples Resistant/mutant; # samples not Resistant/wild type; # samples not Resistant/mutant

[0219] The test is based on the distribution of the samples in the 4 fields. Even distribution indicates no significance, while clustering into two fields indicates significance.

[0220] The following results were obtained
[0221] A total of 27.140 different correlations between genetic sites and anti-microbial agents were detected (p-value<10⁻¹⁰).
[0222] The biggest part of these were point mutations (i.e. single base exchanges)
[0223] The highest significance (10⁻⁷¹) was reached for a nonsynonymous coding in YP_002152062.1, particular in position 2562578 with regard to reference genome NC_010554 as annotated at the NCBI, which is a non-synonymous coding, particularly a codon change aGc/aTc
[0224] Besides these, insertions or deletions of up to four bases were discovered
[0225] Further, potential genetic tests for five different drug classes relating to resistances were discovered
   [0226] β-lactams (includes Penicillins, Cephalosporins, Carbapenems, Monobactams)
   [0227] Quinolones, particularly Fluoroquinolones
   [0228] Aminoglycosides
   [0229] Polyketides, particularly Tetracyclines
   [0230] Folate synthesis inhibitors
[0231] Potential genetic tests for all tested drugs/drug combinations were discovered:
   Amoxicillin/Clavulanate, Ampicillin, Ampicillin/Sulbactam, Aztreonam, Cefazolin, Cefepime, Ceftazidime, Cefuroxime, Cephalothin, Imipenem, Piperacillin/Tazobactam, Ciprofloxacin, Levofloxacin, Gentamycin, Tobramycin, Tetracycline, Trimethoprim/Sulfamethoxazol
[0232] Mutations were observed in 2.223 different genes

[0233] While in the tables only the best mutations in each gene are represented, a manifold of different SNPs has been found for each gene. Examples for multiple SNPs for two of the genes given in Table 5 (respectively Table 10) are shown in the following Tables 14 and 15 (headers as in Tables 3 and 4).

TABLE 14
Statistically significant SNPs in gene dnaK (genbank protein accession number
YP_002149796.1) (headers as in Tables 3 and 4. respectively)

| | | | | best | |
|---|---|---|---|---|---|
| POS | drug | #drugs | drug class | drug | p-value |
| 19947 | CF; TE; CFZ; CRM; AM; A/S | 6 | polyketide*; Lactams | CFZ | 6.4611E−026 |
| 18189 | CF; TE; CFZ; CRM; CP; AM; A/S; AUG | 8 | fluoroquinolone; polyketide*; Lactams | TE | 5.6584E−042 |
| 18338 | CF; TE; CFZ; CRM; CP; AM | 6 | fluoroquinolone; polyketide*; Lactams | TE | 2.2606E−024 |
| 19061 | CF; TE; CFT; CFZ; CRM; CP; CAX; LVX; AM; A/S; AUG | 11 | fluoroquinolone; polyketide*; Lactams | CFZ | 8.7045E−061 |
| 18893 | CF; TE; CFZ; CRM; CP; AM | 6 | fluoroquinolone; polyketide*; Lactams | TE | 6.5221E−024 |
| 18503 | CF; CFZ; TE; CRM | 4 | polyketide*; Lactams | TE | 1.8709E−031 |
| 19630 | CF; TE; CFZ; CRM; CAX; AM; AUG | 7 | polyketide*; Lactams | CRM | 5.7027E−018 |
| 18339 | CF; TE; CFZ; CRM; CP; AM | 6 | fluoroquinolone; polyketide*; Lactams | TE | 2.3907E−028 |
| 18380 | CF; TE; CFZ; CRM; CP; CAX; LVX; AM; A/S; AUG | 10 | fluoroquinolone; polyketide*; Lactams | CFZ | 4.2782E−059 |
| 19954 | CF; TE; CFZ; CRM; CP; AM | 6 | fluoroquinolone; polyketide*; Lactams | TE | 1.3307E−022 |
| 19888 | CF; T/S; TE; CFZ; CRM; CP; CAX; AM; A/S; AUG | 10 | other (benzene derived)/sulfonamide; | TE | 1.0336E−043 |
| | | | polyketide*; fluoroquinolone; Lactams | | |
| 19941 | CF; CFZ; TE; CRM; AM | 5 | polyketide*; Lactams | CFZ | 1.0492E−020 |
| 19062 | CF; TE; CFT; CFZ; CRM; CP; CAX; LVX; AM; A/S; AUG | 11 | fluoroquinolone; polyketide*; Lactams | CFZ | 8.7045E−061 |
| 18359 | CF; TE; CFZ; CRM; CP; CAX; LVX; AM; A/S; AUG | 10 | fluoroquinolone; polyketide*; Lactams | CFZ | 4.0853E−051 |
| 19958 | CF; T/S; TE; CFZ; CRM; CP; CAX; LVX; AM; A/S; AUG | 11 | other (benzene derived)/sulfonamide; | TE | 1.0456E−062 |
| | | | fluoroquinolone; polyketide*; Lactams | | |
| 19891 | CF; TE; CFZ; CRM; CP; AM; A/S; AUG | 8 | fluoroquinolone; polyketide*; Lactams | CFZ | 3.7374E−028 |
| 19772 | CF; TE; CFZ; CRM; CP; CAX; AM; A/S; AUG | 9 | fluoroquinolone; polyketide*; Lactams | CFZ | 3.0990E−043 |
| 19054 | CF; CFZ; TE; CRM; AM | 5 | polyketide*; Lactams | CFZ | 1.8540E−016 |
| 19926 | CF; T/S; TE; CFZ; CRM; CP; CAX; AM; A/S; AUG | 10 | other (benzene derived)/sulfonamide; | CFZ | 5.4187E−042 |
| | | | fluoroquinolone; polyketide*; Lactams | | |
| 18581 | CF; T/S; TE; CFZ; CRM; CP; CAX; AM; A/S; AUG | 10 | other (benzene derived)/sulfonamide; | TE | 3.9631E−046 |
| | | | fluoroquinolone; polyketide*; Lactams | | |
| 19165 | CF; TE; CFZ; CRM; CP; CAX; AM; A/S; AUG | 9 | fluoroquinolone; polyketide*; Lactams | CFZ | 3.1584E−056 |
| 18334 | CF; CFZ; TE; CRM | 4 | polyketide*; Lactams | TE | 1.2022E−011 |
| 18168 | CF; TE; CFZ; CRM; CAX; AM | 6 | polyketide*; Lactams | CRM | 6.5296E−016 |
| 19100 | CF; TE; CFZ; CRM; CP; AM | 6 | fluoroquinolone; polyketide*; Lactams | TE | 8.1028E−035 |
| 18582 | CF; TE; CFZ; CRM; CP; CAX; AM; A/S; AUG | 9 | fluoroquinolone; polyketide*; Lactams | CFZ | 6.4561E−037 |
| 19862 | CF; TE; CFZ; CRM; CP; CAX; AM; A/S; AUG | 9 | fluoroquinolone; polyketide*; Lactams | CFZ | 3.1384E−051 |
| 19949 | CF; CFZ; CRM; CAX; AM; AUG | 6 | Lactams | CRM | 2.9366E−014 |
| 18500 | CF; TE; CFT; CFZ; CRM; CP; CAX; LVX; AM; A/S; AUG | 11 | fluoroquinolone; polyketide*; Lactams | CFZ | 1.0809E−061 |
| 19948 | CF; TE; CFZ; CRM; CP; AM; A/S; AUG | 8 | fluoroquinolone; polyketide*; Lactams | TE | 2.7920E−038 |
| 19845 | CF; TE; CFZ; CRM; CP; CAX; AM; A/S; AUG | 9 | fluoroquinolone; polyketide*; Lactams | CFZ | 2.9595E−044 |
| 19338 | CF; CFZ; CRM; CAX | 4 | Lactams | CRM | 9.54021E−016 |
| 19884 | CF; T/S; TE; CFZ; CRM; CP; CAX; AM; A/S; AUG | 10 | other (benzene derived)/sulfonamide; | TE | 6.5997E−045 |
| | | | fluoroquinolone; polyketide*; Lactams | | |
| 19868 | CF; CFZ; CRM | 3 | Lactams | CRM | 1.6144E−010 |
| 19946 | CF; TE; CFZ; CRM; CP; CAX; AM; A/S; AUG | 9 | fluoroquinolone; polyketide*; Lactams | TE | 2.9201E−050 |
| 19937 | CF; TE; CFZ; CRM; CP; AM; A/S; AUG | 8 | fluoroquinolone; polyketide*; Lactams | TE | 8.0399E−038 |
| 18407 | CF; TE; CFZ; CRM; CP; CAX; AM; A/S; AUG | 9 | fluoroquinolone; polyketide*; Lactams | TE | 2.7572E−055 |
| 19805 | CF; TE; CFZ; CRM; CP; CAX; AM; A/S; AUG | 9 | fluoroquinolone; polyketide*; Lactams | CFZ | 3.1384E−051 |
| 18188 | CF; CFZ; CRM; CAX | 4 | Lactams | CRM | 1.2444E−014 |
| 19865 | CF; TE; CFZ; CRM; CP; CAX; AM; A/S; AUG | 9 | fluoroquinolone; polyketide*; Lactams | CFZ | 3.1384E−051 |
| 18424 | CF; TE; CFZ; CRM; CP; AM | 6 | fluoroquinolone; polyketide*; Lactams | TE | 6.6609E−024 |
| 18617 | CF; CFZ; TE; CRM; AM | 5 | polyketide*; Lactams | CFZ | 5.4482E−019 |
| 19927 | CF; TE; CFZ; CRM; CAX; AM; A/S; AUG | 8 | polyketide*; Lactams | CFZ | 1.5455E−033 |
| 18592 | CF; TE; CFT; CFZ; CRM; CP; CAX; LVX; AM; A/S; AUG | 11 | fluoroquinolone; polyketide*; Lactams | CFZ | 1.1912E−062 |
| 19945 | CF; CFZ; TE; CRM; AM | 5 | polyketide*; Lactams | TE | 1.3405E−023 |
| 18585 | CF; T/S; TE; CFT; CFZ; CRM; CP; CAX; LVX; AM; A/S; | 12 | other (benzene derived)/sulfonamide; | CFZ | 1.8102E−060 |
| | AUG | | fluoroquinolone; polyketide*; Lactams | | |
| 19490 | CF; TE; CFZ; CRM; CP; CAX; AM; A/S; AUG | 9 | fluoroquinolone; polyketide*; Lactams | CFZ | 1.1113E−041 |
| 19944 | CF; TE; CFZ; CRM; CAX; AM; AUG | 7 | polyketide*; Lactams | CRM | 9.2056E−020 |
| 19063 | CF; TE; CFT; CFZ; CRM; CP; CAX; LVX; AM; A/S; AUG | 11 | fluoroquinolone; polyketide*; Lactams | CFZ | 3.1780E−060 |
| 18588 | CF; TE; CFT; CFZ; CRM; CP; CAX; LVX; AM; A/S; AUG | 11 | fluoroquinolone; polyketide*; Lactams | CFZ | 1.1912E−062 |

*(tetracycline)

TABLE 15
Statistically significant SNPs in gene nhaA (genbank protein accession number
YP_002149798.1) (headers as in Tables 3 and 4. respectively)

| | | | | best | |
|---|---|---|---|---|---|
| POS | drug | #drugs | drug class | drug | p-value |
| 22869 | CF; CFZ; TE; CRM | 4 | polyketide*; Lactams | TE | 7.1157E−019 |
| 22977 | CF; CFZ; TE; CRM | 4 | polyketide*; Lactams | TE | 9.7077E−018 |
| 21990 | CF; CFZ; TE; CRM | 4 | polyketide*; Lactams | TE | 1.1168E−015 |
| 22922 | CF; CFZ; CRM | 3 | Lactams | CRM | 2.0983E−011 |
| 21985 | TE | 1 | polyketide* | TE | 6.6089E−012 |
| 22153 | CF; CFZ; TE; CRM; AM | 5 | polyketide*; Lactams | CFZ | 5.1962E−021 |
| 22982 | CF; CFZ; TE; CRM | 4 | polyketide*; Lactams | TE | 7.7442E−039 |
| 22952 | CF; TE; CFZ; CRM; CP; CAX; AM; A/S; AUG | 9 | fluoroquinolone; polyketide*; Lactams | TE | 5.7464E−041 |
| 22983 | CF; TE; CFZ; CRM; AM; A/S; AUG | 7 | polyketide*; Lactams | TE | 3.3785E−029 |
| 22976 | CF; CFZ; TE; CRM; AM | 5 | polyketide*; Lactams | TE | 7.1505E−027 |
| 22931 | CF; CFZ; TE; CRM; AM | 5 | polyketide*; Lactams | TE | 7.7783E−023 |
| 22924 | CF; TE; CFZ; CRM; CP; AM; A/S; AUG | 8 | fluoroquinolone; polyketide*; Lactams | TE | 1.0208E−031 |
| 22302 | CF; CFZ; CRM | 3 | Lactams | CRM | 7.4244E−011 |
| 22249 | CF; CFZ; CRM | 3 | Lactams | CRM | 4.9240E−011 |
| 22975 | CF; CFZ; TE; CRM | 4 | polyketide (tetracycline); Lactams | CRM | 2.3707E−015 |
| 22151 | CF; CFZ; TE; CRM; AM | 5 | polyketide (tetracycline); Lactams | CFZ | 5.1962E−021 |
| 21987 | CF; CFZ; TE; CRM | 4 | polyketide (tetracycline); Lactams | TE | 3.4107E−015 |
| 22010 | CF; CFZ; TE; CRM; CAX | 5 | polyketide (tetracycline); Lactams | TE | 2.5512E−037 |
| 22853 | CF; TE; CFZ; CRM; CP; AM; A/S | 7 | fluoroquinolone; polyketide*; Lactams | TE | 8.5132E−023 |
| 22953 | CF; TE; CFZ; CRM; CP; AM; A/S; AUG | 8 | fluoroquinolone; polyketide*; Lactams | TE | 4.9906E−037 |
| 22164 | CF; CFZ; TE; CRM; AM | 5 | polyketide*; Lactams | CFZ | 2.0434E−018 |
| 21872 | CF; T/S; TE; CFZ; CRM; CP; CAX; LVX; AM; A/S; AUG | 11 | other (benzene derived)/sulfonamide; | TE | 1.0457E−062 |
| | | | polyketide*; fluoroquinolone; Lactams | | |
| 22872 | CF; CFZ; TE; CRM; AM | 5 | polyketide*; Lactams | TE | 2.4397E−020 |
| 22346 | CF; CFZ; TE; CRM | 4 | polyketide*; Lactams | CFZ | 9.3782E−012 |
| 22142 | CF; TE; CFZ; CRM; CP; AM; A/S | 7 | fluoroquinolone; polyketide*; Lactams | CFZ | 1.0064E−025 |
| 21989 | TE | 1 | polyketide* | TE | 5.4618E−013 |
| 22892 | CF; CFZ; CRM | 3 | Lactams | CRM | 1.3318E−010 |
| 22306 | CF; CFZ; CRM | 3 | Lactams | CRM | 3.0874E−012 |
| 22088 | CF; TE; CFZ; CRM; CP; CAX; AM; A/S | 8 | fluoroquinolone; polyketide*; Lactams | TE | 2.8725E−047 |
| 21993 | CF; CFZ; TE; CRM; CAX | 5 | polyketide*; Lactams | TE | 1.3296E−023 |
| 22986 | CF; TE; CFZ; CRM; AM; A/S; AUG | 7 | polyketide*; Lactams | TE | 1.0911E−030 |
| 22248 | CFZ; TE; CRM | 3 | polyketide*; Lactams | CFZ | 2.4745E−010 |
| 22652 | TE | 1 | polyketide* | TE | 2.0483E−011 |
| 22864 | CF; TE; CFZ; CRM; CP; AM; A/S | 7 | fluoroquinolone; polyketide*; Lactams | TE | 8.5132E−023 |
| 21970 | CF; CFZ; TE; CRM; CAX | 5 | polyketide*; Lactams | TE | 1.9096E−037 |
| 22247 | CFZ; TE; CRM | 3 | polyketide*; Lactams | CFZ | 2.4745E−010 |

*(tetracycline)

[0234] Similar results were obtained for other genes, also the ones in Tables 1 and 2, but are omitted for the sake of brevity. The above genes were chosen as they show very clearly the presence of a multitude of SNPs associated with antibiotic resistance in the respective genes.

[0235] Further, a synergistic effect of individual SNPs was demonstrated by exhaustively comparing significance levels for association of single SNPs with antibiotic susceptibility/resistance and significance levels for association of combinations of SNPs with antibiotic susceptibility/resistance.

[0236] For example, a combination of two SNPs for CP resulted in a balanced accuracy of 86.35, whereas the balanced accuracy for single genes was lower than that, e.g. 82.28 for secG at position 3741905, 81.34 for cyoC at position 131826, 81.665 for pykF at position 1482764, and maximally 86.34 for parC at position 2562578.

[0237] The balanced accuracy is therein defined as the arithmetic mean of sensitivity and specificity=(sensitivity+specificity)/2 with sensitivity=TP/(TP+FN) and specificity=TN/(TN+FP); with TN=true negatives=susceptible and predicted to be susceptible; TP=true positives=resistant and predicted to be resistant; FN=false negatives=resistance, predicted to be susceptible; and FP=false positives=susceptible, predicted to be resistance. It is a better performance estimate than accuracy ((TP+TN)/(number of samples)) in case of imbalanced datasets, e.g. if there are much more resistant samples when non-resistant ones or vice versa. In such cases accuracy may be high though the smaller class is not predicted correctly, then balanced accuracy is less biased by the data imbalance (Example: 11 samples are resistant, 51 are susceptible and TP=50, TN=1, FN=1, FP=10. Then accuracy=(50+1)/62=82.26% and balanced accuracy is ((50/51)+(1/11))/2=53.57%).

[0238] Again, similar results were obtained for other SNPs and other antibiotics in respective genes.

[0239] Interestingly, it was also observed that the synergistic effect is enhanced for a combination of SNPs in different genes compared to SNPs from the same gene. Specifically, the above shown example reaching the increase to 158% of the original performance was obtained by combining two mutations from two different genes.

[0240] Although some strains of Proteus are sensitive to ampicillin and cephalosporins, we observed a high resistance against these and other anti-bacterial agents.

[0241] A genetic test for the combined pathogen identification and antimicrobial susceptibility testing direct from the patient sample can reduce the time-to actionable result significantly from several days to hours, thereby enabling targeted treatment. Furthermore, this approach will not be restricted to central labs, but point of care devices can be developed that allow for respective tests. Such technology along with the present methods and computer program products could revolutionize the care, e.g. in intense care units or for admissions to hospitals in general. Furthermore, even applications like real time outbreak monitoring can be achieved using the present methods.

[0242] Instead of using only single variants, a combination of several variant positions can improve the prediction accuracy and further reduce false positive findings that are influenced by other factors.

[0243] Compared to approaches using MALDI-TOF MS, the present approach has the advantage that it covers almost the complete genome and thus enables us to identify the potential genomic sites that might be related to resistance. While MALDI-TOF MS can also be used to identify point mutations in bacterial proteins, this technology only detects a subset of proteins and of these not all are equally well covered. In addition, the identification and differentiation of certain related strains is not always feasible.

[0244] The present method allows computing a best breakpoint for the separation of isolates into resistant and susceptible groups. The inventors designed a flexible software tool that allows to consider—besides the best breakpoints—also values defined by different guidelines (e.g. European and US guidelines), preparing for an application of the GAST in different countries.

[0245] The inventors demonstrate that the present approach is capable of identifying mutations in genes that are already known as drug targets, as well as detecting potential new target sites.

[0246] The current approach enables
[0247] a. Identification and validation of markers for genetic identification and susceptibility/resistance testing within one diagnostic test
[0248] b. validation of known drug targets and modes of action
[0249] c. detection of potentially novel resistance mechanisms leading to putative novel target/secondary target genes for new therapies

1. A diagnostic method of determining an infection of a patient with Proteus species potentially resistant to antimicrobial drug, e.g. antibiotic, treatment, comprising the steps of:
a) obtaining or providing a sample containing or suspected of containing at least one Proteus species from the patient;
b) determining the presence of at least one mutation in at least two genes from the group of genes consisting of parC, secG, cyoC, pykF, flhB, dedA, crr, murF, gmhB, purH, PMI2939, fdoG, PMI3715, and gpmB, wherein the presence of said at least two mutations is indicative of an infection with an antimicrobial drug, e.g. antibiotic, resistant Proteus strain in said patient.

2. A method of selecting a treatment of a patient suffering from an infection with a potentially resistant Proteus strain, comprising the steps of:
a) obtaining or providing a sample containing or suspected of containing at least one Proteus species from the patient;
b) determining the presence of at least one mutation in at least two genes from the group of genes consisting of parC, secG, cyoC, pykF, flhB, dedA, crr, murF, gmhB, purH, PMI2939, fdoG, PMI3715, and gpmB, wherein the presence of said at least two mutations is indicative of a resistance to one or more antimicrobial, e.g. antibiotic, drugs;
c) identifying said at least one or more antimicrobial, e.g. antibiotic, drugs; and
d) selecting one or more antimicrobial, e.g. antibiotic, drugs different from the ones identified in step c) and being suitable for the treatment of a Proteus infection.

3. The method of one or more of the preceding claims, wherein at least a mutation in parC, particularly in position 2562578 with regard to reference genome NC_010554 as annotated at the NCBI, is determined.

4. The method of one or more of the preceding claims, wherein the method involves determining the resistance of Proteus to one or more antimicrobial, e.g. antibiotic, drugs.

5. The method of any one of claims 1 to 4, wherein the antimicrobial, e.g. antibiotic, drug is selected from lactam antibiotics and the presence of a mutation in the following genes is determined: parC, secG, cyoC, pykF, flhB, dedA, crr, murF, gmhB, purH, PMI2939, fdoG, PMI3715, and/or gpmB; and/or
wherein the antimicrobial, e.g. antibiotic, drug is selected from quinolone antibiotics, preferably fluoroquinolone antibiotics, and the presence of a mutation in the following genes is determined: parC, secG, cyoC, pykF, flhB, dedA, crr, murF, gmhB, purH, PMI2939, fdoG, PMI3715, and/or gpmB; and/or
wherein the antimicrobial, e.g. antibiotic, drug is selected from aminoglycoside antibiotics, and the presence of a mutation in the following genes is determined: parC; and/or
wherein the antimicrobial, e.g. antibiotic, drug is selected from polyketide antibiotics, preferably tetracycline antibiotics, and the presence of a mutation in the following genes is determined: secG, cyoC, pykF, flhB, dedA, crr, murF, gmhB, purH, PMI2939, fdoG, PMI3715, and/or gpmB; and/or
wherein the antimicrobial, e.g. antibiotic, drug is selected from benzene derived/sulfonamide antibiotics, and the presence of a mutation in the following genes is determined: parC and/or fdoG.

6. The method of one or more of the preceding claims, wherein the antimicrobial drug, e.g. antibiotic drug, is selected from the group consisting of Amoxicillin/K Clavulanate (AUG), Ampicillin (AM), Aztreonam (AZT), Cefazolin (CFZ), Cefepime (CPE), Cefotaxime (CFT), Ceftazidime (CAZ), Ceftriaxone (CAX), Cefuroxime (CRM), Cephalotin (CF), Ciprofloxacin (CP), Ertapenem (ETP), Gentamicin (GM), Imipenem (IMP), Levofloxacin (LVX), Meropenem (MER), Piperacillin/Tazobactam (P/T), Ampicillin/Sulbactam (A/S), Tetracycline (TE), Tobramycin (TO), and Trimethoprim/Sulfamethoxazole (T/S).

7. The method of any one of claims 1 to 6, wherein the antibiotic drug is at least one of CF, CFZ, CRM, CP, CAX, AM, A/S, LVX and AUG, and a mutation in at least one of the following nucleotide positions is detected with regard to reference genome NC_010554: 2562578, 3741905, 131826, 1482764, 1771087, 1771119, 1918241, 1968294, 2238063, 2238072, 2238088, 2238090, 2454709, 3039125, 3221491, 3221494, 3422635, 4059624, 4059634, 4060202, 131835; and/or
wherein the antibiotic drug is TE and a mutation in at least one of the following nucleotide positions is detected with regard to reference genome NC_010554: 3741905, 131826, 1482764, 1771087, 1771119, 1918241, 1968294, 2238063, 2238072, 2238088, 2238090, 2454709, 3039125, 3221491, 3221494, 3422635, 4059624, 4059634, 4060202, 131835; and/or
wherein the antibiotic drug is CFT and a mutation in at least one of the following nucleotide positions is detected with regard to reference genome NC_010554: 2562578, 3741905, 131826, 1482764, 1771087, 1771119, 1918241, 1968294, 2238063, 2238072, 2238088, 2238090, 3221491, 3221494, 4059624, 4059634, 4060202, 131835; and/or
wherein the antibiotic drug is T/S and a mutation in at least one of the following nucleotide positions is detected with regard to reference genome NC_010554: 2562578, 3422635; and/or
wherein the antibiotic drug is at least one of GM and CPE and a mutation in at least one of the following nucleotide positions is detected with regard to reference genome NC_010554: 2562578.

8. The method of any one of claims 1 to 7, wherein the resistance of a bacterial microorganism belonging to the species Proteus against 1, 2, 3, 4, 5, 6, 7, 8, 9, 10, 11, 12, 13, 14, 15 or 16, 17, 18, 19, 20 or 21 antibiotic drugs is determined.

9. The method of one or more of the preceding claims, wherein determining the nucleic acid sequence information or the presence of a mutation comprises determining a partial sequence or an entire sequence of the at least two genes.

10. The method of one or more of the preceding claims, wherein determining the nucleic acid sequence information or the presence of a mutation comprises determining a partial or entire sequence of the genome of the Proteus species, wherein said partial or entire sequence of the genome comprises at least a partial sequence of said at least two genes.

11. The method of one or more of the preceding claims, wherein determining the nucleic acid sequence information or the presence of a mutation comprises using a next generation sequencing or high throughput sequencing method, preferably wherein a partial or entire genome sequence of the bacterial organism of Proteus species is determined by using a next generation sequencing or high throughput sequencing method.

12. A method of determining an antimicrobial drug, e.g. antibiotic, resistance profile for bacterial microorganisms of Proteus species, comprising:
obtaining or providing a first data set of gene sequences of a plurality of clinical isolates of Proteus species;
providing a second data set of antimicrobial drug, e.g. antibiotic, resistance of the plurality of clinical isolates of Proteus species;
aligning the gene sequences of the first data set to at least one, preferably one, reference genome of Proteus, and/or assembling the gene sequence of the first data set, at least in part;
analyzing the gene sequences of the first data set for genetic variants to obtain a third data set of genetic variants;
correlating the third data set with the second data set and statistically analyzing the correlation; and
determining the genetic sites in the genome of Proteus associated with antimicrobial drug, e.g. antibiotic, resistance.

13. A diagnostic method of determining an infection of a patient with Proteus species potentially resistant to antimicrobial drug treatment, comprising the steps of:
a) obtaining or providing a sample containing or suspected of containing a bacterial microorganism belonging to the species Proteus from the patient;
b) determining the presence of at least one mutation in at least one gene of the bacterial microorganism belonging to the species Proteus as determined by the method of claim 12, wherein the presence of said at least one mutation is indicative of an infection with an antimicrobial drug resistant Proteus strain in said patient.

14. A method of selecting a treatment of a patient suffering from an infection with a potentially resistant Proteus strain, comprising the steps of:
a) obtaining or providing a sample containing or suspected of containing a bacterial microorganism belonging to the species Proteus from the patient;
b) determining the presence of at least one mutation in at least one gene of the bacterial microorganism belonging to the species Proteus as determined by the method of claim 12, wherein the presence of said at least one mutation is indicative of a resistance to one or more antimicrobial drugs;
c) identifying said at least one or more antimicrobial drugs; and
d) selecting one or more antimicrobial drugs different from the ones identified in step c) and being suitable for the treatment of a Proteus infection.

15. A method of acquiring an antimicrobial drug, e.g. antibiotic, resistance profile for bacterial microorganisms of Proteus species, comprising:
obtaining or providing a first data set of gene sequences of a clinical isolate of Proteus species;
providing a second data set of antimicrobial drug, e.g. antibiotic, resistance of a plurality of clinical isolates of Proteus species;
aligning the gene sequences of the first data set to at least one, preferably one, reference genome of Proteus, and/or assembling the gene sequence of the first data set, at least in part;
analyzing the gene sequences of the first data set for genetic variants to obtain a third data set of genetic variants of the first data set;
correlating the third data set with the second data set and statistically analyzing the correlation; and
determining the genetic sites in the genome of Proteus of the first data set associated with antimicrobial drug, e.g. antibiotic, resistance.

16. Computer program product comprising computer executable instructions which, when executed, perform a method according to any one of claims 12 to 15.

The application's sequence listing, which the Patent Office published only in electronic form, follows.

SEQUENCE LISTING (1 sequence)

SEQ ID NO: 1 - DNA, 4063606 bp, Proteus mirabilis (residues 1-2,031,803 of 4,063,606)
  misc_feature: Proteus mirabilis strain HI4320, complete genome
tctgtaactcccccttattagtagtaatatgtatactacaatataagtaatgctcgaataaattttatttaaattgtaggtaaattgaggcaatagaaaagaaaaaatttgacatctctctcgctttgctttaaccagtatagggtcaaactaattttgagacagacaggattgttatgcgtacttacagcccagtgactatgaatacaattattaccaccaccaccaccggaattttatattgcggggcgggctgtcgcatataaaaaacaaaaaacgaaaaagcccgcattgagaaatgcgggcttttttttggcgaaaaatcaggagagctgtatgcgagtgttaaaatttgggggaacttcagttgccaatgcagaaagggtgctgaatgttgctgatatcgctgagaaaaaacgagagcagggacaagtcgctctggtattatcagcacctgccaagataacgaattacttggtggcaatgattgaaaaaacggcagaaggagaagaacctctcactcaagtacgagaagcagagcaaatcttcgctaatctattgcaaggtttacgagaaaatcaacctggttttgattaccaaggtttaaaagacaaagttgagcgtgagtttgctgagattaaacatatcctgcatggtatctccctattagggcaatgtcctgatagcatcaatgctgcgatgatttgtcgtggtgaaaagctttcgattgccattatggagtcggtgttacaagctagaggatataacgttaccgtcattgatccggttaaaaatctccttgctcaaggtcattatctcgaatcgacagtggatattcctgaatcaactcgccgtatttccgcccttaatattccgaaagatcatatgatcttgatggcaggtttcactgccggtaatgaaaaaaatgagcttgtggttctcggtcgtaatggctcagattattcagccgccgtattagccgcgtgtttacgtgcacaatgttgtgaaatttggacggatgttgatggtgtttacacctgtgatccacgcctcgtcccagatgcacacctattaaaaggcatgtcctatcaagaggcgatggaactttcttactttggtgccaaagtccttcatccacgcactattgcacctattgctcaatttcaaatcccttgtttaattaaaaatacgggcaatccagaagcaccgggtacgttaataggtgatggtcaaaaagatgacagcacgccggtaaaagggatcactaacctgaataatatggcaatgatcaatgtatcagggccaggtatgaagggaatggtgggtatggcggctcgtgtcttttctgtgatgtcgcgtgcaggaatatcggtagtattaattactcaatcttcatctgaatacagtattagcttttgtgtaccgcaaaaagagctaattagagcgcaaaaagcactgtcagaagaattctatctagagttaaaagatggcgtacttgatccgttagatattatgaacaatgttgctatcatctcggttgtcggtgatggtatgcgcacccttaaagggatctcagcccgtttcttctctgctttaactcgaggcaatattaatattgttgctattgctcaaggctcttctgaacgctctatctctgcagttattactaatgatgcagcgacgaatgcggtgcgtttatgtcaccaaatgctctttaacactaaccaaatcgtagaagtctttattgtcggtgtcggtggtgttggcagcgcgctaatcgagcagatccatcgtcaacaagcatggctaaaaaacaaacatatcgacctacgtgtttgtgggattgccaattcacgtgcgatgctaaccaatatgcaaggtatcgatttagataattggcaacaagcgctacaagcagctaaagagccttttagctttagtcagcttattcgcttagaaaaagagtaccacttcctcaatcctgtgattgttgattgcacttcaaacgaaatgattgcacagcaatacgccaatttcttacaaaatggctttaacgttgttacgcctaataaaaaagccaatacgatgtcgatggattactatcatcaaattcgccaatcagcggaagcatcacgtcgtaaattcttatatgacactaatgttggtgcgggtttacctgttattgaaaacttacagaacttgcttaatgctggcgatgagttggtgcaatttaatggtattctttctggctcactctcttatatttttggtcagctagatgaaggaaaaagcttgtctgaagcgacactttctgcgaaagaaaaaggctttacagagccagatccaagagatgatctctcgggaatggatgttgcacgtaaactgcttattctcgctcgtgaagcgggctatcaattagagttgagtgatattgatgtagagcctgttttacctagctcatttgatagtacaggtgatgtcgagagtttcttaaaccgcttacctcaagtagatgttgagtttgatgctaaagtcgaagaagcccaaaagtcagcgaaggtattacgttatgtggggatcatcaatgaagggaaatgccaagtcaaaataatggccgttgatgctaacgatcctctctttaaagtaaaaaatggtgaaaatgcgctagctttctacactcgctactatcaaccaattcctttagttttacgtggatatggtgcaggaaatgatgtcactgctgctggggtatttgcagatgtattacgtacactatcatggaaattaggagtttaaaggtggttaaagtttatgcaccggcgtcaattggcaatgtgagtgtcggttttgatgtgttaggagccgcagtttcgcctattgatggtcaattattaggagattgcgtaaccgttgaagcggcgcaagaatttcaacttcacagcaaagggcgctttgttagtaaattaccttctgatgctaagcaaaatattgtttatcaatgttgggagctattttgtgaaaaattaggtaaacaattacctgtctcgatgacacttgaaaaaaacatgccgataggttcaggattaggatcaagtgcttgctctgttgtggctgcactcgttgcattaaacgaatttgctcacaaaccatttagtgaaagccacttattattaatgatgggagagctggaaggccgtatttccggtagtgtgcattacgataatgtcgcgccatgttatttaggtggtttacaacttattttggaacaaaacgacattatttgtcagcctgtgccggcttttgacgattggtattgggtgatggcttatccggggatcaaagtctcaacggcacaagcaagggctatcctccctaaacaatacgataaagctgatattattaaccatggtcgttatttatctggatttattcatgcttgtcatacacaacaaccaaaacttgccgcaagcttaatgaaagatgtgattgcagagccctatcgaacacagttgctccctggttttgataaagcgagagaggctgcattacaaaaaggcgcgcttgcatgcggtatttcaggctcagggccaacgctgttttctattactgattcattggctattgcccaagatgtggcgcaatggttacaacaacattatgtacaaaacgatgaaggctttgtacacatctgccgtttagatactcgtggcgcaagagagatagggtaagtaatgaaattatataatttaaaagataaccaagaacaagtcagctttgctcaagctgttaaacaaggtttaggaaaacagcaaggactcttttttcccaaagacttgccttcattttctcaagcagaaattgatgcgctattaaaattagactttgcaacacgcagtagccgtattttaagtgcttttatcggtgatgaaattcctgctgatgtgttagcaaaacgtgtaaatacggcatttgcttttcctgcgccagtgacacaagtagaagaggatattagttgccttgaactcttccacggaccgacgctggcttttaaagactttggtggccgttttatggctcaaatgttatcagaagtcgcgggtgaccagcctgttacaattttaacggcgacatccggtgatacaggagcagcggtcgctcatgctttctataagctagataatgtccaggtcgtgatcctctatccacaaggaaaaatcagcccattacaagaaaagctattttgcacattaggggagaatattcatactgttgctattcaagatgactttgatgcttgccaagcattagtcaaacaggcatttgatgatgaatatttaaagaacaccatgcatttaaactcggctaactcgattaatattagccgcctactggcacaaatctgctattactttgaagcggttgcacaaattccagctgaaaaacgtcaacaattagtcatttctgtaccaagtggtaattttggtgatctcactgcaggattactggctaaatctatgggattacctgttaaacgctttattgcagcgaccaatgtgaatgataccgttcctcgctatttagatagtggtaaatgggaaccacatcggacaatagcaacactttcaaatgcgatggatgttagccagcctaataattggcctcgtattgaagagttatatcgtcgcaaaggttggctgttatcggatctttcgcatggggctgtgagcgatgaaacgacggaaaaaactgtacgtgaactggcacaaaaaggctatatttcagagcctcatgcggcggttgcttatcgtctattacgtgatgagctacaagaaggagaatatggggtatttttaggtacagctcatccggcgaaatttaaagaaaatgtcgagcgtattttaggtgatacattacctttaccaaaagaattagctgagcgtgctgataaaaaattactatcgcatcttttaccggcagatttttctcaattaagagcatttttgttagaacgagcacctaaataaatataattatttatattaattaattttgtttttattaaaaagctcactataatggtgagcttttttattgttttaaataattttatacccaaataaaaataagaaaataatcatttaatgctaaggagaattacactagtttttatctcttaatgtaattaacaataaagaggtagactatgggtagatttaagaaaattaatatcaatgatgatattgaaagaattacactagaaatagtgaaatatattaaagagcatagtgttgaattaccttttaatattgattcagtaagacgtgttttaattgagaattatatttatattcttacttataaaaatgaatatgctgctaatgattttttaataaaaatagaaagtaatttatctctttataatcgggataaatttactaaagcgattgattttattgtaaaagagattaatgcaagtatagagaatttatttgttaataattcttatcttacaaacaaaaattatcaaaagctaaataaaacacgtattaattcagtatttcagcattacccatcaggattttttcacttaaaaatagaaaataaaaacttatttatacagatagataataccaatcaattatttaaaatcattgactttgaaggtacagtggaattcttttctaaaaaagatgaccttattcatactattaatcaaatggttaaaaacagtgttgctgataactctatatcttaccgattttacgctaagaacgaatattttaatttctttactctcgataaatattggcaagtaacacctaaagatatttatgccgaagttattaatgatattaaggcaaaaaaacaggtacatattgatagtcatttaactattgaattaatagatagctattcatataaaaatatttttattgttagagactctaatgaaaactcagaaaaaatactccatatatatcttaataatattgatgaagcattcttgattgccgtagctaaacatcgtcagctaaaagaaaatggtgaacatttactttataaattaaataaggattggttctttactaaaatgaaagataaatccgttaaatatttttcacaaacttctgatttattaataccattagaaaagataatgggcagaattaatcttgtcgcttcagctgaaaataattataattttagccattttgatccactttcaggagtatgttatggaataagtttgaaatatttattggaggttagaaataatggtatagaaggagggaataaatatttacattggctaaaggaaaatattaacctttacaaggacaaaaaagaaaagatatctgataagcttgaaaaaattatatttgatagtgtacaagaatatgaagtattaaaattgattaaagagatcaaggaaattaaattcgcacagatttttcaaatggagagaatatatgaaaaaataaattatacaatttttgatttaacaaaggcgaccgaataccgaaaaattttagcagaaaatggcttgaaagcatcgaatgcaaataggctagaaagtagtctctcacaaataaattatcacttagaatatataatgcaatattataatgaatattatgcgattattgcatttaaaacacatgccattgctcttgcttataagagatattctaataatcattataaatttacgctatttgattctaattctgaattgacggaattttctaatatagaatcaataaaagacgctttaataaaaataatgggctcttatactctaaataaagctgatggaaaagaatattttataattgatgaatataaaagaaatcctacaacaaaatatcgtagtttatgggatcaaaatgaaatcgagttacataaaggtattgctgaaaatataaaaaaaattggtttttcattgccttttaaagatggtgttgttggacgagttattcattacagtgaacagcgtgatctcattttagaacttaaaataaatagtaaattagttgaagttgtggtcaaaaatgtttttgttgatgagggaatatttttagttaaaaataatttagataaaattcttgagaataataaatccagtaaagtaattataatgagcaatagtgatggtattgatattcaatttactgaatttaatgcacatcaaaaaatgagtaagccaaaaggatatctggaatttaatgatgtttattatcgagatttaattaagattaatagttatttattaaatggtaaaaaatcattttcattgaataaaattgtttcattaattgatacactaagggggaatatttattttgataaaataacagccagtttttctataattgatgaaattatactatttaatcaaaacaatgaaaatatttctcttgttgatatcctgaatcaagtgaaacagaaaatagaagataaattattctatggtgatctcctttatggaaaggaaaagttaattgcattagcacaaaaaaatagcctagtagcagcaattttttatcgaatgatggttaatgaaatcaatgaaggttatactggaattagtaattttatttatgagcaaattattgataacccttttttaatattagataaaaatagaaatgtcggggttgttggttatgattatacgattaattttaaaaataattataaagcgttaaaagaaattattgatggtattgatatttctgaaataaaaaatatttttcttttagatgatgaaaatagactgcacttaaaagtaacttatcaaagattatcagaatatagaaacaacaagtatgttaataagcttcttcatttgattgaagatgaaattgattctataaaaaaaatagataatacaggtgtttatcgtgatttatatcttgagttttttagcaatcatcagtttaataatagagtgattattcatgaaatagcacaattagaaagttattttaataataattatcaggagcgaaaccatggctatcatcctagtaatttttatattaatgaaaatgatcctcttaccctactagaaaagtcatttaatcagaacaaaaatgaaatagatggtagttatctgttatttaatgaaagtaaagaaaattttgattttttatttgttgataataattttattactagagattttgtagataatattattattgaaagcattagtggcgtttatcaagatgatatcgtcatttatttctataatggtgtaaaaagtgaacaattaacacaatacttaaaagataaaccagaaataggccgttttcttgattattgtttaaaacatgaaataagagtgattgctgctggaaatgaagaatactttcctgccaccaatgcgcttgttaagcagaaaagccgtgttgaatcactacaaaatgttattttacaacatcaatttgttggtgaaagaacaattgtttttgccaataaggagactttatttagttatcaaagtggtcatttatttattgaagggattgctcagcggctaaatatgcctatttatactgtgacggataacaatcttatacttgaaaatgaatacattatggtaaaaccgacgactgaaagtcagtttattggtcaccctttacttgctgatacaggtgcatctaatacgctacttactgaaacagtacctaatgagcctaatacaatgtctaataggcaaagagtagatattgaaaataaaaactatgctgcagaaatttatcaattcgtctcacacaattacactaattatagagataatcaagagtttaagttaggttatcagaatgagattagcacgattttttctggctattctgacaatatgaccattgctgatattttaaattacattcagttaaatcgctatcagattaattatactcaattaggcacaattattaggaaagttgatcaaattaatcttaaatatcataaagaaaaactcacagaactcagtgataaaataattaatcatgatttactcattgataatgcaattgagaaatatttggttgaattatcggcagtatttaatacgtcagataatagtttaataaaaaggaatttaattcaatcactttatgatccctctgttaataaagaatttaaccaatttttaatggatggaatgaactttgaacagtggcaagaaataactaataaagactatggaaactataatttaacggaaagaacgtatcaagttattgaaattattcatgcgatttatgatactcctcacttaatagataatttaagtgaactatctaaaaataggcttaatgctttttttgatgagggtaataaaggtattttatcacgagtattattgagcaaaatttcaagctttgaactctataaagagaccataaataatttaaaaaaactcgctgttatcagtcagtctgatgaagagattagcgctttatcgccgacagaagcattaaataaactcaatgaatttaaaggtgaagttaacttagccacaagtgaagatagctctaccatttcttctaaagtggaaattaataatcttgtcattgacaaaagattactctgttatttaggtgcaaagataaatggtgaaagtatcgatgcgatagatcttaatcagatagagaactgggataaaaaaattacttttgatcctcagcatcttaatgattattttttatctgtgacgggcaatgaaaaagataaagaagttattgcattattacgttatctattaaataacaaacaagataaaattaaatattttctttctcatatgtccagtagagctgattatgtcgcggctcatgaaagattaatgaaaataatagcattaggtagtaaacagtataatcagcaagattgggaaaatttaagaataccttcattaaaaattcccagacatatgagagttatcagtaaaattggttacgctaatattagcttcggtatatggcaatcaatcaattcaacctttatgcttgctgagcaacttaataatccgctattaacccctcaagagcatagagagatcatcaataatcttgccataacatggtcagaaatggcctataatggcttatctgaactcattgaaatcgctttagctaaaggattattaaagtaccgtaataatcctttggagtatattagtaaaaccagcactcgaataggtatcgggcttaatatcctgtctattggatttgatatctataatatctacgataactttagtcgtatctcagtagaaaaaaatgaaaaacgacgtattgactatattgtaaatggctctttagctatagtctccggattggtcactttgggggtttctatcgcaatgcttgctggctctacggtcgcggggcctattggtattgtcgcgggagctgttatcgccttagccatttcaatttataatgccgcaagactgatagaagaagcgaaagaaaaaataggatttacaccactagaagaacttaataatggtttttatgcatttttaatgggggatatcttaccaagcaaaaagaatgaaatcgtctatttagagacaatatcacagttagaaaccatgattgaccaaaatgcgcaagaacatcttaaagaaataaaaaaacaggagcctcacagttattatttttatacgaatgagaaacaattttatgaagaacatcattattataaagtgatccctcgtatattggggaaaacgttagataatatacttaatccgtttggagaaattgttgtacaacgagtggcgaaaaatttaagtaaagaagaagcagaaaagatagctgcgctttctcattatcttagtgtcgaaagaacggaatataaatactatgttcctaaagaagccatcgcaacagatgaaattctcatttttgatatggatttttatgttaatcaattaaatcgttatacgattaattttgcatttgaagatgataatcctgtttttgaggatgaggtggatatctctttttttgataaaataagaacaacaaaagaaaaaacatggcaaaatttatcatcaggagaattaacagatgatttaattaaatcaacagctgaaaaacaatattttgagccaagttggcgtgagaatgagctattttattttaatacttataatggggatgatattattgctgcaccattaataacacaaaatatatttgatgttcataatgggactaaacgattaagtggaggagaaaaagatgacacctttaatgtgttcacttctgaatctcctcgttatgccagccgtttttatggtagagaaggtaatgatacattacgtattattcagacagaaaaaaaatatatagggtatgaagttaatttatctaaaaattatattaaatttatcgggggagaaaataaatccaatagccagagttttcatgccagactttttatctttcaagagcaaggacaaatctatacccataaattagcggatacaatgcctaatataacactacaaagacaacccgttattgcctatttagagagtattgaaaatgtagtaggcagtgaaataggtaatgatattatttatggtgaccaaaaaaataactatttaaatggcatgggaggggtagattcattatatggattagctggagatgatacgctggtattacgggaaggttatgcacaaggaggggcagggaatgatagttatactattctaagagcatcaaatacagataataatgttaaacaacttgaaactattattgatgaagagacgcatacagaagctagtcttatccagttaaattatacttttgatgaaattgctgctatttctcgtcgtgaaacagatattgtttttacgcttaaagttggtaatgataaagatcctgatcaatttatcgagcatttaattgcattaagtcatgtataccaagataaaaatagtcaattattagcccatcgatataccattgtgactatggatggttttatacttactattaatgaaaataataatcaaccaagagaggtatcatataactttagttatttagaaaagtataatcagcaagagaaactacaacagctttctgttaatgacgataaacacacattgtctattcaatctgaaaataaaactaaacttattcaattattacctgagctacaatacagtggtttctcttctggagaacatttaaagcttaatctacagggtaatagcgaaaataatcattatgctggaattgcggctcattcatcaattaaactgagtcgcggttatgacaattatcaaataagctcattgctagctaaaaatagaaatgaaaagatcattatttctctgagtgataatgataaacaattaacatctgattgtactagtcatttctttttatccgatgtgagtggatttgatttgatgtttagtgatggcgttttatctcatcgctataatcctgatgctcatattaaacttgttttcgatacggaaagtgttagtgctatttttaactcaggaatgacacttcaatttattgataaagataatcgagtttttcatttgcctaagccagacagcggtcagcgtttactgatccccactatcactttggatgttaggttgagtcatcaaagtgatgttctgatgatcccaccctccctacgtttaaataaagaggcattatcattgtatcctcagtattttcatagagaagaaccatcatcacgttcaacgcaattacagcgtattatatccactcaaacactagagccttatccattaaaggtaacagaattactgagagatgatattgctgttaatgataatcaacctgttaattctattttgtctctcaataaactattttcaaacagatcacaagatatattctctcaagctatagatttattaccaatgatagaattaatggatggtgatgatattgttgttaatcataatcaaagtagctcagtgattgatgggggtaaaggtgatgatcatattgttgtcaatgaagggcaccatattttaattgctggagaaggtaatgataatcttaatggcggaagtggacatgatctgtttatttcaacctcaggaaatgattatctaggtggaggaagtggtaataatgtttatgtggtacaaaaacgccatggtgaagtgacggtgtatgatgaaggtgaaatgagccatatttttgtatcaggattatctgagcatgaaaaattaatatcctctcaagcaggtaaagataaacagtatcgaacggctgataatcaatttgtcttgactgttaaaacaaaccgagtagagaaaatagaaactgatcctgtgaaggttatcgaaaaagaacagacattatcaatgggatcccttgcgacaattattcaacaaatggctcaatttaatcagcaacaactatcgacgatgcaaggcagtgacgttattccctcatcaaactggtcgcctttagctgtggtcgttaagcatttataatttcccttgtgacccaataaaaatagccctattttcagggctatttttatgaattactatcatttgatagcaaaaaatgaggcttattttgctagatgttctgcacgtttaaagacaagggtattgccttcagactcggcggcattaaattgataaccctctagattaaattctttaagttgtgccttatcacttaatctttcttgaataataaaacggctcattaaacctcttgcttttttagcataaaaactaatcactttatatttgccatttttctcatcaagaaaaacaggtttaataatttccgcattgagtttttttgggttgactgatttaaaatattcatcagaggctaaattaaccaagatattatccccttgagcttcaagggcgttatttaacgtttcagtaattatgttaccccaaaactggtatagatcactgccttttttattgttcagttttatgcccatctctaagcggtaaggttgcattaaatcgagtgggcgcaatacgccatataaaccggaaaggatacgtaaatgctgttgtgcaaattgaaagtcgtcatctgtgaaaagttcagcggcttgcattccggtataaacatcacctttgaacgctaaaatggcttgtcgcgcattatcgggtgtaaagtcaggttgccattcaccaaagcgagccgcatttagtcctgccaatttatcactaattttcattaagcttgcgatatcactggacgacagttttcgacattctgtaataagttgttgggaatattttagcaattcaggctgggtgaactgcgttgttgctaaaggcgattcgaaatccagtgttttagctggtgaaatagtaattagcataattccctcaatagttattttgatttagttctactatagcaaattgtttggtagataagttaaatcataataataggaaaaaacaatactttcaccaatgtgccataaaatagacatattaaacgattcagcctgagttgttattctgttttttgctacttttgttttgcgaaatcgtttggcattcaaataattgctttcgatgaatctaagcatcttgtagtgtgagcagtccatgttattatcaatagatatccgcaggtgactgcaaacagatttacctagtagatgagataaacaaaatgaccaacaaattaacttctttgcgtaaactgactacagttgtagctgatacaggtgacattgcagcaatgaaactgtatcaacctcaagacgcaactaccaacccttctttaattttaaatgcagcccaaattcctgaatatcgtaaattaatcgatgaagcgattgaatgggcgcgttcacaaagcgattctcgcgagcaacaaatcgttgatgcgtgtgataaacttgctgtcaatatcggtttagaaatcttaaaactgatcccaggtcgtatttcaacagaagttgacgcacgtctttcttatgataccgaagcctgtatcgtcaaagcgcgtcgtttaattaaactgtataacgaagcgggtattagtaacgatcgtatcctgattaaacttgcttctacatggcaggggattcgtgcagctgagcaattagaaaaagaaggtatcaactgtaacctaactttactgttctcttttgctcaagctcgtgcatgtgcagaagctggtgtatacctgatctctccattcgttggccgtattatggattggtataaagccaatacagataaaaaagagtttgcaccagcagaagatccaggtgttatttctgtaactgaaatttataactactataaagagcatggttataacaccgtcgttatgggagctagcttccgtaatattggtgaaattttagaattagcaggttgtgatcgcctaactatttctcctgcgttattaaaagagttatcagaagcacaaggtgaagtagagcataaactatcctttaatggtgaagttaaatcacgtcctgcgccaatcactgaagctgaattttattggcaacataatgctgatccaatggccgttgataaattatctgatggtattcgtaaatttgcggttgatcaggaaaaattagagaaaatgattgcagatttattataatctggcgtttaattcttataaaaactgacaacacccactttaaataggggggtgttgtctttttttttattgcaaaataatatttaaaataattttaagattaaattgatttgaataaataatttatccggtaataattataaaaattaattattaaaagcatcctatttattattggtgaattatgaaaaagatggttttggcaacagtactggcatcgctcttttttagtagtgttgctatgtcagaagataaaacagccttctctttacctgcgattgaaaaaagtgcggaagaagggaatgccgcttctcagtatcaacttggtgttaaatatgaaggtggcgaaggtgtagaacaaaatacacaaaaagcattggagtggtacacaaaagcggctgaacaaggtcatgcagaagcgcaattaaatttagcgttaatgtatgatatgaatgatgatattgagcgtgatgctgaaaaagcggtttattggtataacaaagcggctgttcagggactctctttagcacaatacaatttggccgtctcttttgatgaaggggatggtgtagagcaagatcatgaaaaagcagtgtattggtatacaaaagccggtgagcaaggtgatagcgatgcgcagtataatttagcgatttcatatgatgaaggtattggtatcgaacaagatcatgaaaaagcggtgacttggtacactaaagccgcagagcaaggtcatgctgatgcacaatacaacttagctgtctcttacgatgaaggcgaaggggtcgagcgtgatggtagcaaagcggtattctggtataccaaagcggcaaatcaaggtaatcgagatgcgcaaaataaccttggtgtgatgtatgacgaaggtgatggtgtagcaaaagatcaacgtaaagcgaacgaatggtataaaaaagctgcgctacaaggtaatggcttggcacaaaataaccttgcaataaactattattatggcaaaggggttaaacgtaacttgaaagaagcctatgcatggtttgctgttgctgtagaaaatggtgaaggtgatgaggctatgctaaaacgaaccgcccgtgccctcaatgctgctcaattagcagaagctaaacttttagctgcttcttatattgctaaatatcttgatgactaagattaaatcattaatgtgataaaaaacgggagtataaaactcccgttttttcatagctaaaataacataatagcttttactgagattgtttttaattcacccgtgttctcgtgttaatatcagcacgctaattggcagttattgattaatttgaggttgatatgaatgaattacgtataggactggtttctgtttctgatcgtgcatccagtggtgtttatgaagataaaggcctgcccgctttagaagcttggctaaaaaaagcaatcacaaccccttttcatatcgaatcacgtttgatccccgatgagcaactgatgattgaacaaacattatgtgaactggttgatgaagcaggatgtcacttggttttaacaacgggaggcacagggcctgctcgtcgtgatgttacgcctgatgcaacattggcgattgctgatagagagatgccaggcttcggtgagcaaatgcgccaaatcagtttgaaatttgttcctacggcgattttatctcgtcaagtgggagtgattcgtaatcaagccttaattttaaatttaccgggacagcctaaagcgatcgcagagacattagagggattaaaagacagtgagggacaggtgattgtcagtggtatttttgccagtattccttattgtattcaattattggatggcccttatatcgaaactaacgaagaaattgtggttgcctttagacctaaatcagcacgccgttctacatctgcttaatacattgcatcggttgtttttgttattaatatcgaatgtgagtacgttttgccctaataagattaaataagaacaacctgctatttttacctatgagtgatgcttctgttgatgatttattgatcattgagataaccccctttgtgtaataattgattgaaactgttatatttcaattggttattttttatattaatggattatcgctgttgttttacatcatcataatgggtgaaagacaatactttctataacctattgatatataatatttattttttatattgttattttactagatcttttttttatctttttactatttttttttatttttccccttgatgaatgtatttatgaccccatctatttttcaactgcaattaccactattgagttgcgttgatgtttatccgctttgtgatgatattgagtccattaattttttgacttgaaaaatgaatattcatcctcatatagattggtaatcaaattgataaagaattctctttggaggcgtttaaatgggtaaaattattggtattgacctgggtacaactaactcttgtgttgctgtaatggacggtaagaatgcccgggttattgaaaacggtgaaggcgatcgtaccactccttcgattgttgcatatgcacaagatggtgaaattctagttggtcaaccggcaaaacgtcaggctgtgactaactcacaaaatacattatttgccatcaaacgtttaatcggtcgtcgtttcgaagacgcggaagtacaacgtgatgtttctatcatgccttacaaaattattaaagctgataatggtgatgcatgggttgaagcacgtaacgaaaaaatggctccaccacaagtttctgctgaagtattgaaaaaaatgaaaaaaacagcggaagattacttaggtgaaccagttacagaagctgttattacagttcctgcttactttaatgatgcgcaacgtcaagcaactaaagatgcgggtcgtatcgcgggcttagatgttaaacgtattattaacgaaccaacagctgcggcattggcttatggtttagatcgtgaagtgggtaaccgcactatcgctgtttatgacttaggtggtggtacattcgatatctctatcatcgaaattgatgaagttgatggcgaaaaaacctatgaagttctgtcaaccaatggtgatactcacttaggtggtgaagacttcgatagccgtttaattaactacttagttgatgagtttaagaaagaacaaggcattgacctgcgtaatgatccattggcaatgcaacgtctgaaagaagctgcagaaaaagcaaaaattgaattatcttcagctcaacaaacagatgtgaacttaccttatgttactgctgatgcgacagggcctaaacacttaaatatcaaagtgactcgtgcaaaactggaatctttagttgaagacttagtaaaacgttcaatggatccagtaaaagttgcattagaagatgcgggcttgaaagttagtgaagtaaacgacgttattctggttggtggtcaaactcgtatgcctatggtacaaaaaactgtggctgagttcttcggtaaagaaccacgtaaagacgttaacccagatgaagctgttgctatgggtgctgctgttcaaggtggtgtattagcaggtgatgttaaagacgttctgttacttgacgtgactccactgtctttaggtattgaaactatggggggcgtgatgacttcgctgattgcgaagaataccactatcccaactaaacatagtcaagtattctctaccgctgaagataatcaatcagctgtaactattcacgtattacaaggtgagcgtaaacgtgcgagtgataacaaatcactgggtcaatttaacttagatggtattcaacctgcaccacgtggtatgccacaaattgaagtgacttttgatatcgatgctgatggtatcttgcatgtatctgcaaaagataaaaacagtggtcgtgaacaaaacatcaccattaaagcttcttcaggtttaaatgaagaagaaatccaaaaaatggtacgtgatgcagaagctaatgcagaagcagaccgtaaatttgaagagttagtgcaaacacgtaaccaagcagatcaattagttcacggtacacgtaaacaaattgaagaagcgggtgacaaattagcggctaacgataaagaagctatcgaaaaagcgttaagcgaattagaaattgcttctaaaggtgaagataaagctgctattgaagcaaaactgcaagcgttagttgaagcttcaaaacctctgttagaaattgcacaacaacaagctcaagcgggtgcaggtaatactgccgatgcaactgatgcaggtgcgaagaaagatgacgatgttgtcgatgcagagtttgaagaagtagacggcaaagataaaaaataatgcccttaacgggccgcggtaactcaatgatgaacagttactgataccgaaacacgggcgtcgaggcaactctacgcccgtgtgcttatgtcaagggtaatccagaatggcgaaaagagatttttacgaagtactcgggttaagtaaaacagccgatgaaaaagagatcaaacgtgcttataagcgtttagcgatgaaatatcacccagatcgtaatcaaggtgataaagattcggaatctaaatttaaagaaattaaagaagcttacgaagttcttagcgatccacaaaaacgtgcggcctatgatcaatatggtcatgctgcctttgaacaaggtggttttggtggtcaaggcggtggtggctttggtggcgctgactttagcgatatctttggtgatgtgtttggcgatatttttggtggtggtcgtcgtcaacaacgtgctgcacgcggctcagatttgcaatacaacatggacttaacgctagaagaagctgttcgtggtattaccaaagagatccgcattccaaccttagaaacctgtgataaatgccacggaagtggggcaaaagaaggcacatcagcggaaacttgctcaacatgtcatggggcaggtcaggttcatttacgtcaaggtttcttcaccgttcaacaaccatgccctacctgtcatggtcgcggtaaagtaattaaagagccttgctctaaatgtcatggtgatggccgtgttgaacgttataaaaccttatcagttaaaatcccggcgggagtggataccggtgatcgtattcgtttaagtggtgaaggtgaagcgggtgagcaaggagcaccggcaggcgatctgtatgtacaggttcatgttcgtcagcaccatatatttgaacgagatggtaataacctctattgcgaagtacctattaactttgcggttgcagcattagggggagaaattgaggtgccaactctcgatggtcgtgtgaaactaaaaattccagcagaaacacaaactggcaaaatgttccgcatgaaaggcaaaggtgttaaatctgtacgtagccatggtgtcggtgatttaatgtgccgtgttgttgttgaaacgccagtgaaactgaatgaaaaacaaaagcagcttatggaacagctaggtgaatcatttggtggtaaaggtggtgaaaaaaatacaccgcgctctaagagtttcttagatggagtaaaaaaattctttgatgatttaaccaaataatttttgcgttatcttcattcccaaaaagcctgataatgtattgcctatcaggctttttcttattaatttcataaaaatacctagaaacttattctctgttatctttaatagtcattcccctcttatttcattaggtatcctctggtaacaaaaaaggttgaacaatattatattcacctcttattattcttgtgagtaaattatcaactattcttaataaaaagcacactatagtcacaataatatggataaaaaatagaatatttacctgttttctatcaattcttattttaaatgtgaattattacttatgtttatcataaaaaataattgtatcaataggttgtattttattttttttatttttgttttttatctttcgtgatattacttattgattattttttacataattccttctttactcttgatataagcgattgagatcgaaaaagccgaattatttttgctaaataatctgttttttacgaattcataattagcatattattaacacaaatagacatttttaggttaacaatatgacagcaattattagacaatttttaagattagaggcatcaggcggtattcttctgattgttgctgctattatcgcattaataatggcgaatacacctcttagtgctttgtataatgagtttttatctatcccaataatgattaaatttggggcattagagctagataaaccgttgatcttatgggttaacgatgcactcatggccatctttttcttagtggtaggattagaagtcaaacgggagctaaaagaaggttcattagcgcaacgtgatcgcgctatttttcctgcaattgctgcagtaggaggaatgttagcacctgctttgatttatctattttttaatcatggcgatgcgattggtcagcaaggatgggctattccggcagcaacagatattgcttttgctctaggtgtaatggcgttactagggcgtcgcgttcctgtggaattgaaagtctttttattagcgctagccattattgatgatcttggtgtcattgtgattattgctctcttttattctaagagtgtggcattagtcccgttattattggcagcgctaatcaccatcatgttgtttattcttaattggcgtaaagtgagtaatacagcagtttacttagtcctaggctttattttgtgggtgtgtattttgaaatcaggtatacatgccacaatagcgggagtgattgttggattcctgatcccattaagagataaagagggggcttcaccgtcggaagagttagagcatgttttacacccgtgggttgcctacttaatattaccgctatttgcttttagtaatgcgggggtttctttaaatggcgttacccttgatggcatgttatcgaccttacccgttggtattgcattagggcttttcttaggtaagccgattgggatttttctctttagttgggtttcggtaaaactagggattgcaaaattgccagatgcgattaatcttaagcaaatatttgccgtttctgttttatgtggtatcggttttactatgtctatctttatcgcaggtcttgcgtttgaaggtgctatagaagcctataatacatactctaaactgggtattttagttggctccaccatggctgctgttgtgggatatttattgcttaactctgttttaccgaagttgaagcagaagcaaaaatagcgaaattgagtagggaactcgttttctaaacacaataaaaaccgagctataaacataaacctacggcgcaataccttgtattgtgccgtaggtgtttttatgaggattggagaaaggaacaccaatcgctaatgcgttgttaacgaagtctgtgtgatgagatcacagaagttgaaaggaaaatcactatgcgtgtgtcacatctcaattttaatcatctttattatttttggcatgtgtgtaaagaaggctctgttgtaggagctgcggaagcgctgtatctgacacctcagacaattacagggcaaattaaagcattagaagaaagattagggggaaaattattcaagcgtcaagggcgcggattagttccctctgaattaggtcagcttatttttcgctatgccgataaaatgtttatgctgagccaagagatgctagatattgtcaactatagtcgagaatctaacctgttatttgatgttggggttgccgatgcgttatccaaacaacttgttagtcgtgtattagaaacggcggttattgatcatgaacaaatacatttacgctgttttgaatcgactcacgaattgttgttagagcaattaagtcagcataagttagatatgattttatctgattgtcccgtagattcctcacaacaagaggggctgttctctgttaaattgggtgagtgtagtgtcagttttttctgcagtcagccaataccagaaaagccattcccagaatgtttagaagatagaaaattgcttatccctggtcgacgctctatgttaggtcgtcatttgttaacttggatacgcaataaaaatcttcaagtagaaattttaggtgaatttgatgatgccgcattaatgaaagcatttggtttaaatcataatgctatctttgttgcaccttctatttataccaatgagacatttgtccaaagtaatattgaggaaataggcacattagactcggtaaaagaagagtattacgttatttttgctgaacgaatgatccagcatccggcagtacaacgtgtatgtaataccgatttttcagctttgtttagtggttaaaagaaagccaataacgaatgaaatacgtagagtttgcatagacagaatgtaaaaaaaccggcctaagccggttttttaaacacaaaaacaataattacattgctttgatttgtgcttgcagattagctttatgacgtgctgctttattcttatgaattaagcctttagttgcctgacggtcaacaattggttgcatgtcattaaatgctttttgtgctgcttctttatcaccagaagcaactgctgcgtatacttttttgatgtaagtacgcatcattgaacgacggcttgcgttgtgctgacgacgcttttcagactgaaccgcacgtttcttagctgatttgatattagccaagttccaactcccaaatatattctagcgaggacaatacaaaggtgaaggaatatgccttttcaacctaagtttgtcaatggatttatacaaaattagcgtcgttgtacgcgacactggtttcgttgtgatggcgcaagattttatcagttaagacgggtagaatacagtcttttgagtgaaaaaatcatcaaaatcgtgtatatgagtaataaataatagattctaagcggatctacggttgattttgtgcgattttataaccaacaagtgagtaatcgtttattttttgttagcagtgagcatgttaatttaacaatcatagtgaattgacaaagcaagatattactcaccaataaacattgatatattgggttactctcgagcctttgacaaggtataatccaattatttccacggtattgagccagttatggagctaattcgcggtatacagaatattcgagcacaacatcatggttgtgttctaacaattggcaattttgatggtgtccatcgcggtcatcaggcattattaaaacacttgaagcaagaagcatcacgtcgtggcctacctactgttgtgatgacatttgaacctcaacctctggagttttttttgccagagaaagcacctgctcgtctaacgcgcctacgcgataagataaaatatttggcagagtgtggtattgattacctgttatgtgtcaaatttgataagcaatttgcggcacaaacaccggaagagtttgtttcatcactcttagttgataaattaggtgtgaagtttttagccattggcgatgattttcgttttggtaaaaatagagcaggtgattttcattttttacaacaagccggtgctcgatacggatttgaggtggcaaataccgaaagttattgtgacaaaggattacgtattagcagtacggcggtacgagaagccttattcaatgacgatttagcattagctgaatcattgcttggacacccttatagcgtttgtggacgcgtggtacatggtaatcaattaggcagaactattggttttccaaccgccaatattcccatgaaacgcttagtggcacctgttgctggtgtttatgcggttgatgtttatttagccgaccatcaatcgcctttagcgggggtggctaatattggcagtcgtcctaccgtaaaaggtaagggtgtacaattagaagttcatttaatcgacgttaatatggatttatatggacgtcgtattgatgttgtgttacgaaagaaattacgtaatgaacagcgatttgcatcattggatgcgttgaaacagcaaatcgcaaatgatgtggctgctgctagggattttttattgcagcggtcggagtcataaactagcggaaacttggaactgagaatcgaatgagtgactataaaaataccctgaacttaccagaaacagggttccctatgcgcggggatttagcaaagcgcgaaccagaaatgttatcacgttggtacaaagaaggtttgtatcaagctatccgtcaagctaaaagtggtaagaaaacatttattttgcatgatggccctccttatgccaacggcaatattcatattggtcactcagtaaacaaaattctcaaagatattattattaaatccaaagggctgtcaggctttgattctccgtacattccaggatgggattgtcacggattacctattgaattaaaagttgaacaaattgtaggtaaaccaggagaaaaagtctctgcagctcaattccgcgaggagtgccgtaaatatgcttatgagcaaatagaggcgcagaaaaaagattttattcgtttaggtgtgctaggagattgggacaaaccttatctcactatggactacaaaacggaagccaatactattcgtgcattagcgcgtattatcgctaatggtcacctattaaaaggggcaaaacctgttcactggtgtacggcttgtggttcatcgctagctgaagcggaagtggaatattacgataaaacctctccttctatcgatgtgcgtttccgtgcggttgattcaaacgctgtagcggctaaatttggtgtcgtcactgataaacctatttctttagttatttggactaccacaccatggacattacctgctaaccgtgcaattgcattaaatggcgaatttaattacgcattagtttcatttgatgatgagtgcgtcattttagcggcagacttagttgaacacgttatgaaacgtatcggtgtcacagactgggctgttttaggtgaatgtaaaggtagtgatttagaattattgcgcttcaatcacccatttatgggctttgatgtgccagccattttaggcgatcacgttacattagatgccggtacgggggctgttcataccgcaccgggtcatggtcctgatgactttgttattggtcaaaaatatggtttagaagtggctaatccggttggacctaatggttgttatcttcctaatacgtatccgaccttagatggtgtgtttgtttttaaagctaatgatgtgattgttgagttactaaaagaaaagggtgctctattacatcatgaagcaatgcaacatagttatccttgctgttggcgacataaaacaccggttatcttccgtgccactccacaatggtttatcggtatggataaaaatggattacgtcaacaatccttaaaagagatcaaaggtgttaaatggatccctgattggggccaagcacgtattgagtcaatggtggaaaaccgtcctgactggtgtatttctcgtcagcgtacttggggaacaccaatgtcgctgtttgtgcataaagaaacacaagagcctcatcctcgtactctagagttaatggaagaagtcgctaagcgtgtagaagtgagtggtattcaagcttggtgggacttagatatccgcgaactgctgggtgatgaagctgatgactacatgaaaacacctgacacacttgatgtttggtttgattcaggatcaacacactcaaccgtagttgatgctcgccctgaattccatggcaattcagctgatctctatttagaaggttcagaccaacatcgtggttggtttatgtcttctcttatgatttcaacagcaattaaaggcaaagcgccttatcgtgaagtattaacacacggttttaccgtagatggacaaggccgtaaaatgtcgaaatccattggtaatactgttagccctcaagatgtaatgaacaaactgggtgcggatattttacgtttatgggttgcctccaccgattatacgggtgaaattgcggtttccgatgagatcttaaaacgttctgctgatacttatcgtcgtattcgtaatacagcgcgtttcttcttagcgaacttaaatggctttgatccagctaaacatcaagttaaacctgaagagatggtaatacttgatcgttgggcggtcggtcgtgcgaaagcggcacaggaagatatcctcaagcattatgaaaactacgatttccataatgttattcagcgtcttatgcagttctgctcagtagaaatgggatctttctatctagatatcattaaagacagacaatacactgcgaaaagcgacagtgttgctcgccgtagttgtcaaactgcgctataccatattatcgaagcattagtacgttggatggcaccaattatgtcgttcactgcggatgagatttgggcacagttaccgggtgagcgtgcgaaatttgtgttcactcaagaatggtacacagatttatttggtttagaggcatctgaaaccttaaatgatgagtactgggcggagttattagccgttcgtagtgaagtcaataaggtgttagagcaagctcgtaccgataagcaactacgtggctctttagaagcggcagtaacactgtatgcggataaagccttagcggaaaaactgaatgcattaggaaacgaattgcgttttgttttacttacctctcaagcgaccgttgctgatattcatgatgcgccagaaaacgcgttagcatctgatatggcggggctgaaaattgtcttgagtaaagcgcaaggtgaaaaatgtccacgttgctggcactatgcaactgacattggtcaagtggcggaacacgctgatttatgtggtcgctgtgttactaacgtagccggtaacggtgaagaacgtaagtttgcttaattgatgaagaaaacactttgctctacaggtttacgctggctctggttggctattgctgtagtggtgttggacttaggtacaaaacagtatttcatgcagacattccgtctgtatgaatctgtggctgttatgccttttttcaacttcacttatgctcataactatggcgcagcttttagctttttagccgataaaggcggatggcaacgttggttttttgcattaatcgcactggcaatctgcattgtcttagtggtgatgatgtataaaaataaagcgagtactaagctaagtaatattgcttatgcgcttattataggcggagcattgggtaatctttctgatcgtctgatccatggatttgtcatcgattttctggacttttatgtcggtgattggcattggcctacttttaatattgctgatgtgtctatttgtcttggtgcaggtttaattatcattgagagctttttccctgataagaatgccagcccacaagaagccaacaagcagaagtaatctgacagatcagttaactaaaataacccctgcctaatggcgggggttacgcttaatagaaggtattagtatgagtatgcagatcctcaataatagtgcggtattgctgaatttcaccttaaaattggcagacggctctgttgctgaatctacacaagcacatggaaaaccagcgttatttcgtcttggtgatgaaagcttatcgcctgctttagaagcagagttggtaggacttaaagaaggggaaaagaaaaccttcacgcttgcgggggagcatatttttggtaaatataatcctgatcttattcaatactttatgccttctgattttgcgcaatccggtattcctgaaacaggtaccattatgctgtttacggcaatgaatggtaatgaaatgccaggcattgtgcaggaagtgacggaagattctgttactgtcgattttaatcatccattagcgttacaagatgtcacatttgatattgaagtcgtcagtattgatccacaggaggaaacaacaaatgcaaatattgctggctaacccacgaggcttttgtgcgggtgttgaccgagctatcagcattgttgaacgtgcattagaaatctatggcgcgccaatttatgtacgccacgaagtggttcataatcgctatgtagtcaatgatttacgcgaacgtggtgctatttttattgaagaaatctccgaagtgccggataacgctattttgatcttctcagcacacggtgtttctcaagctattcgccaagaggcacgctctcgtaatttaacgatgctttttgatgccacttgtcctttagtgaccaaagtacatatggaagtcgcaagggcgagccgtaaaggtaaagaggccattttaattggccatgccggacacccagaagttgaagggacgatggggcaatacaataacccagaagggggaatgtatttggttgaatcgccagatgatgtatggaaactaaaagtgaaagatgaagataatctttgctttatgacacaaaccacattatcagtcgatgatacttccgaagtgattgatgccttaaataagcgattccctaaaatcatcgggcctcgtaaagatgatatctgctatgcgacaaccaatcgtcaagaagctgctcgagagcttgcagagcgtgccgatgtcgtgtttgttgttggctctaaaaactcatctaactcaaatcgattagcagagcttgcacaacgtgcaggcaaaccctcttatttaatcgatagtgctgaagatattgatgaaatatgggtaagccatgccaatattgttggggtgacagcaggagcatcagcaccagatattttagttcaacaagtcttagcacgattaaaggcctttggtgcagaagaagtgattgagctatctggcagagaagaaaacattgtttttgaagtgccaaaagagttacgtcttgactataaagtagtcgaataataacaatagctataaacatttaatttaccaagcagagcctaggctctgctttttttatctccttttttataaatcgtaaaatttaatgaataatcatgcggttcatcgcttttgctgatgatctctatccttttgttcgtttttcttattatcgtcgttaaatgctggcatcaaacgaatgacatcgttaatctgtaaagtattaataaagatcataagtgttactaaggagaacatagattatgtctgcaacagaacttcgtcttgcggtagtgggggctggagggcgtatggggcgccagctgatccaagcgattaatcagcaacaaggtgtggtattaggtgctgcttttgaacgtactaattcttcattgataggggctgatgcaggagagttagcgggaattggtcatatcggtatcactgttactgataatttattagctcaagtcgggcaatttgatattttaatcgattttacgcgtccagagggtacgttgtctcatctggcattttgtgttgagcatcataaaggcatgattattggaactaccggttttgatgaagaaggtaaaaaagccattaattgtgcagcacaaactattcctattgtctttgctgctaactttagtgttggcgttaatttagtgcttaaattattagagaaggcagctaaagtgatgggatcttatagtgatattgaaattgtagaagctcaccatcgtcataaggttgatgcaccatctggtacggccttagcgatgggcgagtcgattgcagagactttaggtcgagatctgaaagattgtgcggtttatcaacgagttggacatacaggagaacgtgatcctcgcagtattggctttgcgactattcgtgcaggggatattgtgggtgaacacactgctatttttgcagatattggtgagcgagtagagattagccataaggcctcgagtcgaatgacctttgcaaatggcgcggttaagtcagctatttggctaagtgaaaaaaaatcgggtctttataatatgaaagatgtgctttctttagaagaattgtgattttattttatatttaatttattgaaaacccatgattatttatattatttgtgggtttttgttgttgtttatataatatttgtttgttgtttttgtttttttataacttcctttattttcttccatttttatagttaaaatttcgcttaagtctctttttttcttttctctatcatctttttaaaatatcttggtaagcaaacggttaaatttgtaagatgggtgatagaaattgtcatttagctgattaaattgctaatgattgatatttttttaattaaaagagtgttttttctagacatctgctcatgggatctttagaatgcgcccaatttgccaaaaatttgcccaaatttatgtttttggcattgatttagagtcttaaatctgaattaatatgcatgaaatgtgatttattattctctggagggcgttttgattaaatcagctatactggttctagaagatgggaccgaattccacggcaggtcgataggcgcagaaggcgctgctatcggtgaagtcgtttttaatacttccatgaccggttaccaagaaatattaaccgacccttcttactcccaacaaattgttactctcacctatcctcatattggcaataccggcgttaattcctcagatgaagaatcagcaactatccatgctcaagggttaattattcgcgatttacccctagtgatgagtaattatcgtgccgaagagagcttagccgattaccttaaacgtcatcagattgtggcgatagctgatattgatacacgtaaattgacgcgattattgagagaaaaaggcgcacaaaacggttgtattatcgcaggcactcatcttgatgctaaacaagcgcttgaaaaagcaaaagcgtttccaggattaaaaggaatggatttggcgaaaacggtgacagtggaacaaccttatcaatggacacaaggcagttggacattaaaaggagagttgcccgccactcaatcaccacaagatctccctttacatgtggtggcctatgattttggtgtgaaacgtaatattttacgtatgctggtggatagaggctgtcgagtaacagtggttccagcacaaacctcagcccaagaagtgttagcgctctcacctgatggcatttttctctctaatggtccgggggatccagagccctgtgattatgcaattgacgccatccaaactttcttaactaccgatattccagtatttggtatctgcttagggcaccaattattagccttggcgagtggtgcaaaaaccgtaaaaatgaaatttggtcatcatggtggcaaccatcccgttaaagatttagataataacagtgtgatgatcaccgcccaaaaccacggctttgctgttgatgaagcatcgttacctgattgtttaagagtgacacataaatcactatttgatggttctctacaaggtattcatcgcacagataaagctgcatttagtttccaaggtcacccagaagcgagtccagggccgcatgatgcggcgccgctttttgatcactttattgaacttattgagcaatatcgtcaaaacctgcaatcagtgacaaacaaataaatcaggagtgaaaaaaatggctaaaagaacagatattaaaacaatcctgattttaggtgcaggcccgattgtgattggtcaagcgtgtgaatttgattattcaggcgcacaagcgtgtaaggcattgcgcgaagagggatatcgtgttgttttggtaaattcaaatcctgctaccattatgacagatcctgaaatggcagatgccacttatattgagcctattcattggcaagtggtcagaaagattattgagaaagagcgccctgatgccatattaccgacaatgggcggacaaacggcattaaactgtgccttagaattagagcgtcaaggggtgttagctgaatttggcgtaacaatgataggtgcaacggctgatgctattgataaagcggaagatagacaacgctttgataaagcgatgaaaaaaattggtctggatacggctcgttcaggcatcgctcatactatggacgaagcatttgcagtggctgagcaagtgggtttcccttgtattattcgcccttcatttactatggggggaacgggaggcgggatcgcctataatcgtgaagaatttgaagaaatttgtactcgaggtttagatttatcaccgacaaatgaactattaattgatgaatcattaattggctggaaagagtatgaaatggaagtggtgcgcgataaaaatgataactgtattatcgtttgctccattgaaaactttgatgcgatggggatccataccggtgactctatcacggttgctccagcgcaaacgctaacagacaaagaatatcaaattatgcgtaatgcctcgatggcagtattacgcgagattggggttgaaactggtggctccaatgtgcaatttgccgttgatcctaaaacagggcgtttaattgttattgaaatgaatcctcgtgtttctcgctcatcagcattagcgtcaaaagcaacaggtttcccaattgcaaaagtcgcggccaaacttgcagtaggttataccctcgatgagttgatgaatgatatcactggaggaagaaccccagcctcttttgaaccttctattgattatgtagtgactaaaatccctcgctttaactttgaaaaatttgccggtaccaatgaccgtttaaccacgcaaatgaaatctgttggtgaggtgatggctattgggcgcactcaacaagagtcaatgcaaaaagcattacgcggactagaggttggtgcaactgggtttgatcctaaagtaaacctcgacgatcctgaagcgctcaccaaaattcgtcgtgaattaaaagaagccggatcggatcgcatttggtatatcgcggatgctttccgcgctggaatgtcggttgatggggtgtttaatctcaccaatatcgatcgttggttcttagtgcaaatagaagagattgttcgcctagaagagcaagtggcacaacttggtttagcaggtctaaatgctgatttcttgcgtcaattaaaacgtaaaggttttgctgatgcgcgcctagctaatatcttgaatgtgaaagagcaagccattcgccaattacgagaacaatatcaattacacccagtttataaacgggttgatacttgtgcggcagaatttgctacggataccgcttatatgtactccacttatgaagaagagtgtgagtcggatccaaatcaagacaaacctaaagtgatggtcttaggtggtggtccaaatcgtatcggtcaggggatagagtttgattattgttgtgttcatgccgctctagcattacgggaagatgggtatgaaaccattatggtcaattgtaatccagaaacggtttcaacggattatgatacctccgatagactttattttgagccagtcacccttgaagatgtattagaaatagtacggatcgaaaaaccacaaggcgtgattgtgcaatatggtggtcaaacgccattaaaattagcaagagctttagaagctgaaggggtgcctgttatcggtaccagtcctgatgcaatcgataaagcagaagacagagaacgtttccaaaaggccgtggataagttagggttaaaacaaccagaaaatgccacagtgacgacattagaagaagcggtagataaggcaaaatctattggttacccgctggtggtacgtccatcttatgtccttggtggacgagcaatggaaattgtttacgatgaaattgatttacgtcgttatttccaaacggcggtcagtgtttctaatgatgctcccgtactgttagaccgattcctagatgatgccattgaagtggatgttgatgcgatttgtgacggtcaacaagtggtgataggcggtattatggagcatatcgaacaagcgggtgttcactctggagactcagcttgctctctacctgcttatactttaagccaagatattcaagatataatgcgcaagcaagtacgtgaactcgcttttgaattaggcgttaaagggttgatgaacgtacagtttgcggtgaaaggtaatgatgtttatcttatcgaagtgaatcctcgtgccgcacgtacagtgccttttgtctctaaagcaaccggtgtgccattagcaaaagttgctgctcgagtgatgataggacaaagtcttgaacagcaaggcgttaccaaagaggtgatccctccttactactcggttaaagaggtggtacttccctttaataaattctcaggtgtcgaccctattttagggcctgaaatgcgatctaccggtgaagtgatgggggttggtgctacttttgcacaagcttttgctaaagcgatgttaggtagcaattccaccatgaagaaaaaaggaagagcgctactttcggttcgtgaaggtgataaaaaacgtgtcgttgatttagcaactaagctattgaaaaatggttttgagttagatgcaacacatggtactgccattgtcttgggggaagccggtatcaatcctcgcctagtgaataaagtgcatgaagggcgacctcatattcaagatagaattaaaaatggtgagtatgactatattgtcaatacgactgccggtcgccaagctattgaggattcaaaattgatccgccgtagtgcattacaatataaagttcactatgacaccacattaaatggcggatttgcgacaacactgtcattgagtgctgatcctactattgatgttatttcagtccaagagatgcatgcaaagataaaaaaatcttaattttttagttgttgttataacaatcccgaatgggtattaattacctattcgggatttttcttttttcgatgtaatagaaaaaagaaagccccacataacgacatgtagggcgagtgcaaaacaaagaggtgggtgcagatcttttttcaagaatggaggcaagaaaataaaataagtaaatttctttgttttagcggattgattttgtcttttttagatgtcagtgtcaacaagaatatttattagttattcatgtaacatgttgttttaatttgattaattttaaaaaatactaccagtaaggtatagaggtgagggaaaattctgctactatagcggtgggtgcttggatcgttttggttcaagcattgcgctagagccaaaaagacaaaagccccgaattttattttcataaaatccgaggcagtctcaaagctcaacaacttgattctgcctcctttattaaaaggagtcaatcaaattgacgaaaataaccttatttggcattacggttgtctgtgtgacggtacttatgtttgctttaattgtcggtgaacgattatgttcgcttaacattagtaacggaaacatggtcgttcaagctattttgatgtgtcatcaatagcttgatgggggaggtttcctccccccaatttttgttcaagttgtgagatatgtggtacaagcacccggtctttaaaaatatccccctatttggccatcccaatgaaattcttttttaagataactggatctgttacctatggttatatttgcttttaacgtaccatgaccagaatcattaattctacattcttcgtctaatgcgtagtgtgctgatgtcggcgatatttcagctatttttttagaatgctcgctaaatataatcttatctggataagttaatttctcattaatatgtccgatgagtttatccgatggatttaatgttacatcatataattccgtagtaatataaatgggataaagtaagtttttcggctcacctttaaatactaatcttggcgttaaaataagatgtgttgtagtggttgaccaaccattttgacaagatgaagcaagggcacctgtatctgtatagataaatttagaattataatcaagagagattattttatatgcgttattggcaggaaaatagtcaatattaattttatactttttaggatcgacgtaaggctgattattactatcaaaggttgtgacttctagtgttaattgttttggactggttagatattgtttcggtacctgaatttttaccgggtcatgtatattatgtttaggtgcatagttttgtctttcttctaaggcgatagaagtgccgttttcatcaaataactcgaagttaatcgctttaggtgtgtctgatgaagaccatttaacaataaactgatcgtctgaagtgtataaaggttgccaagttaaatcatccaaatgtgtatttgatttgctctctcccgcagatagaaactcaaatgagttaattgtgatgcgaggcgatgcttgtataatgacgttatagctttgctcatgatcttgaaaataattattatttttcacctcaagtgttaatgttgtttgcccaatattaaggtttttgataatcccatctggggtgatttcaactatgttaggttgactactataccaagttgcattcgcttcaacggggacatctggcgtagggctttgagccatcaataatttatctgcagcagaatcagttgttaatacaatataattctttttaaaataataacttagtgcagctttttcttgctgatagtctacagtttggctatcagctaggaatttatctgtagcatcactttgtattactatttttgtttttcctggtttaatggcggttaagttacctttactatcaatggtggctaccaaggtatcgctactagagaaatgaatgggggtatttttaacctctggattatcaaattccgctgttatttgatgggtaatgccatcattccagatcgattgtatggtgtgaggagaggttactttcagttttggtggcgctttttctatcactaaaggatagctatttttagctgatggatattgctcattacctaaggtttgtaaggtaataattgtagtaccagcctttttcatggagatttgcccacttgttgtatcaatggaagcaacagtaggatcagagcttgaccatattacctgcatattttgtggtacacctttataacttaacgcatcaatcacagttgatttgtagatttcctgttggataggtttctcaaaggtaatttcagatttagggatagccactttaatcgtcaatggctctgcgatagttattgtttcagcttgagcggttaagataatatcggacatcgtatttgctgtaacatttgtttgatattcaccattgcccactgactttaatggattgtcactaaaattaggcttaccactgatagttttaatctcaacattcttaccatcaatggtattaccgtatttatccattaattttacgcttaataacgtactatctttattatcagcatttatagaacgacgatgactattaaaggttgatttatgaatatctatttcagccggtattacagtaatatcttgtgttgatttataattattagaatcaagataagcgctcatcttcaagcgtcccgcgacatgactagtcactcgattcgttgctatccccttatcattagtataagtgctgtaatgataatcatctgctgatccgagtaatttccatgacacaataacattaggtaatacattattattggcatcaacgacagttgcttggtagttaacacctttatctcctgcggttatggttgttctatcaacctcaacagcgcgtattttccatgtcgtcacatcggcattaagttgtaatattttttgttttttgaaatgggtgccatttaccataacaccaatctgtgctgtgcccgattgagttcctgttatttcaatctcatagcgtcccggtgatatttgttgtgcttgactaaatttgatggttggatttttagaaaatccgcttacttgttggttggggatgatatttccatttttatctttaataacaaatgtcaataatgccttatctttgccattagcaatgatttgactcgggttcaacgacagttctgacatcgtttcatcaatgtgacccgttaaaaagtgaacatcatctgctatataagtacctgtttctaatattgcgctgactttggcaacaccgacagagcgtcgagataatccaactattgctacaccattatcatctgtaaaagttaatggtgtttcgagttgactaccttcattcgttgaccaagcgacaggtacacccataccgacaggattatcatggttatcaactaaataggctttataagtaatagactccccagcatgtggttgaatattgctaatagtaaagtttttcacctttgctgttgtgttattagggagcaccgttaaagaaacggattgttttattgctaatggagcaacgtgagccgataacgaggtttttccggtttttaatgcgctcacttgggcttgataaatgcctttttgtttctctttaaagggcgtaatcgttgtttgtaaattagtctgcggcgttaaggtgattttattggctaagttgggcaataaattaccttctttatcctttaaggttattgttacggtcgctttatttgcccctgcgacaatagtgtcagggaatatggcaacagtagaaagagaggccgaaatatcaccttccgtaaaggtgacaatgtgatcagcattgacagattgttggttattgagcactgccgttactttcgcttttcctgcctgagtacttgagagggtaatttcagctattccttgcttattggtcatgcttaatggtgctgcaagcttaccgagatcacttatccaaccgacagtaacgccttttgatactggattgttatgtttatcggtgatttgtgcttgaataatgactttgtctttaccattcgctgttacggtataaggtgccataaccttaacggagtggatcttgactgttttattatctgttaaaaatcctaaagattgcgttaccgtaatactatcaatagtggcggtaatttgactgagtcccgcttttgtacctctaatatgagcttgataattgccgttagccgtttctgtgattttactgaattggatggtgctgttatccccaattaacgcaatatcgttactacgacctattaccggattatcaaatttatcacgcaggtctattttacccacagcaaaggcattaccatcggcaatgatagattgtggttcaatcgtcaaataactattttgttgcactggcgctcccgcaacaaaggttacctgaatgctttttttctctttatttgataaataggcggtaattgttgttggctgtgctttggttcctgaaatgacaacttgcgttctgcctttttcatctgtttgagtagtagtttcatcaatatgattaatacttgattgccaatagacagggatatttttcaatgggttatgataagcatcagttaagtttgctactacggtaatgctatcttggttatctgctatggcagattgcttattatttaatgtcgttaatgtgagagtggcacttttgagatctgcaacggcaactaagttagtttgtgcatgttgaccattatttaatcgcgcggtgatggttgtgatacctgattgtgatgttgttagcgtatttttggcgataccttgagcatcggtcttagtttgttgctgagcaaattgagtaccagcactcccttgccaattaacaatagtatcaggaagttgattacccagtttatctgttactattgcagtaagttctgcgggatcttgcttatctgcaacaatctgatttttattaaccaataattcactaatcaaagcttgttgcccattagcaataaaagtaattggctcagcagtaaaggcattgttatttatacgcgcagttacccgcacactgagtgcttgtgtactggttaacttgttggtggtgatcccttgctcattagtcattgtggtatgttcaatgttaacaatacttttatcgtgctcagtttcccagctaatttgtgcatgagggagcggcttaccaaactgatcttgtactaatgcagtaaggaagaccggggtttgaccatctgcgacatgagttgtagaggatggggttatggagacaataacccccttagcttggttggcgataaattgggttgtcgcgtgagtcatcttgtcgtttattttggccctcacggtgaccgtaccggcgactttacttatcatagtggtggtcgccttaccttgctcgtctgtggttaatatggtttgttttaattgtgcttggttatctgccgataatgtcacatgagtagcgggtatcggattattttgcttatcaacaacttgtaatgaaatggttttttctgttttaccatcggctagagaaagtggtggtgtgatcgtgaagttttgttgtggaatataggcgctatcattatccacactaaaatggacttcagtcgaataggttatcccttttacttgtacaccaatctgcgaactccctacttgagtattagtcactgaagcaataatctcaccttgttcatccgtttttcttgagctaatgacattagcaccattactggcagtaaagttgactggataatgagccaatggattgtggttgctatcagtgactcgtactttgattttattttgacttttaccgtcggctggctcgttatcttttgtaaccgttaggttgccttttgcaatatgggcagtttgattatcggcaataagtgtcacggttgctgagttgaaggtattatcacggaatacgggggttagggttaatttttccggtatgcttcctgctgtaaccgttaattgatatttcccagcagctaaacgagagaaagtagaaatacggctattgcctttttctgtatcagactgttgctgtaaagtaatttctttactatcaatatcaacgggtaaattatcattatcaacgatggataatattaacttttgggttgcttcaccgttagcgaatagttggctctgtttaggtgaaaataggctattacgcgtattgattaacgatttatctacaataaccgttgtttgaacaggcgctgaacgattgccatgggtatcaatggcaacagcactaatgatatagctatttttctcaattgcaccaatttgatattgaggcaaaatcacggtgtagtgagttccaccatgatgttttatttgcccgccttgggcatttaacttacttgcggaccattcaatattggctaacggatattttgtttttacttgaacttgtaaatcgcgctcctctttagcataaccatttattgaatcaaccatagaaaggaaaactaaagtttcctttttatattctaaaatcatatcgttattacgattaacaaagtcataacgacttcctgctaatgtacgtattgctttgacattatcaggattaagttgtgaagcgagtgattctcctatgcggtaggacaagttgatattcaagttattatcagcacgatcatgtaagccaatacgacgctcggcatttaatgtgactaatggtatcggagtataattaatccctaatgtgtaggtatgtggatttttgtcccgtttatctttgccaaatagaccaacttctttaccgtagtattgttcaaagattaatttagtgcctaattgtggataagctggaaaatagccttctgttcgaatgtcccaaccattcgcagggcgttcactataatctaagatattattagaggctcgccaacttgatagacggtgataatggttagaacttaatttgaaatagtctcgccaaatttcggcgccaattcccaaacgattatgatgatgcgttaaatcatgatcataaaagccattaatgccgaccataaatttttcagtaaaatagcgataaccaataccataattaaattggctacgaagatctttgcgatgatagttagtttgagcaaagatcagcttttctttttgttcatataatggaattaacaattccgctgagctattttttaaggtgagatttttatctgctgaaagtgaaactcgcgcatgcccaaattgattaagccattgttctattttctgattggatttactggagatttggctaattgcatattgtgttacatcgatatctttattgagtaaaaatgaattatcaacaataattttagcgagctcttcgccctctgttgaggggattgcctcatcttgattattgagccactttttttttaataaatattcattaggaatattaagaatagttccatcatttatttttagctcacccgttaacgatacatgttgtggattagcttcaatcaatttaaataattttatattaaatttttttgcgatagattctggggtatcacccgctttgacttgataagtattttgttgatttatatcgctaatattatgttttttaaagttattctcattggcaaaagtctgcgtaggcatggttgtcacaataggaaatgctaattgtataaaaatattaagccaagcgacttttctcgtaatagaactggggcgtggggaaggtacattatttaacgtcgtcatttttaaactcatcgtaacaaataatgatgagattttcgtatttatagtttttttagatatcagaaactgaactttaagtaactaacttaacaatatataaaaaatagcagatgaaaattttaaatgtaaataaagatttaatttgacttagttagacatgcgctaatcatatattaaaaaacaataaatttactttgtcttattttaaagtgtaatgatataaaatatatatcattggtatagttaataaaaagccaatagcaagagtactattggcttacttatagagcgtgaaatactagatatcaacaaaagtatcaggatcaggccccaaccgctttcctttatctagttgttttatttcagcaacttcttctttttctaatttgaaatcaaagatatggaagttttcttcaatacgagaaggggtaactgatttaggaataacaaccaagccactatctaaatgccaacgtaacacaatttgtgccggtgttttttggtatttttctgccagtttctgaataattggttgatcaaacacgccttcaccaccttgtgctaaaggactccatgattctgtcacaatattatgggtggtattccaagctcttaatgaagcttgttgcatcaatgggtgaatttcaatctgattaatgacaggggaaacgcccgtttctgtaataatgcgctcaaggtgctcttctttaaaattacataccccaatacttttaaccagtccctctttttgtaacacaatcatctgcttccaagcgtcaaggtatagctcgcgagatggcactggccaatgcattaaatagagatcaacataatcaagttgtaatcgctcaaggctttcaagtaatgcaccacgagcatgggattgatcgttgttccataatttggtggtaataaataattcgtctcgaggaatagtgctttgctttaatgccttaccaacaccttcttcgttatgataaatagcggcggtatcaatcagacgataacctgtgtctaaagcatgatgtaccgctttaataacttgatcattatctgcttgccaaaccccaagtccaagttgtggaatagtgttgccatcagatagttggatcaatttaggattactcattatatacctccagttgcctttaagtacttagagtgctgccatatagatacgctggctgacttccaaggtgatatcctgatgttcaccgagtgcggtttgtccatgttgttgcagtttttgcactaaggcaggaatatccgcttcactgatattaaagtcagacagccgtgtttttagtcccatgcgttcaaagaacttacgagtctcattgatggcgctatcgattttaaatgcatcagagccttgatggatcccccacactttttgtgcatattggatcaacttagcgtatttctcctgacgtttttcgtttaatagcgcgggtaagacaatcgcgagggtttgtgcgtgatcaagcccgtgtaatgcagtaatttcatggcctaatgcatgggttgcccaatcttgcggtacaccgacaccaagaataccattaagtgcttgggatgctgtccacattatattagcacggatatcgtagtcttgtggtgaggtgagggctttcggtccttcttcgattaagatccttaataggccttctgcatattcatcttgtacaagcgcatttaccggataagtaagatattgctctaaaatatgaataaatgcgtcaacaacgccattagcggtttgtcttggtggtaaagaaaacgttgcagttggatctaaaatagcgcaatgaggataaacatgtgggctagcaaaactttgtttatccatcgtttgttttttactgatcacggaaaaacaattggtttcagagccagttgctggaagggttagtacacagcttaatggcagtgctttttcaattgcctgacctcggctagtgacaatctcccaaggctctccttgataaggtattgcagccgcaataaatttggttccatcaacaacagagcctcctcctacagccagtaaatgagtaataccgtgataacgagcgtaagcaacagctttcattagcgtttcatacgaaggattgggttcaataccgccaaactcatgaatttgataccctggtaaggccgcatgcacttgatcaagtatcccattgcgcttaatacttccaccgccataagttaataaaattctttcatttttcccaatttcagaacgtaattttgcaatttgtccttgaccaaaatgaattcgagtgggggagtaataagtgaaattttgcatggttgtttccaccttaattttatgttcttgatatgctgtagcatgacaaatcattaggaaaaattatttcactgtatatagacgggataatatgacatcactataacagcggggttatgaatgcgagtgttaaaccctttttttcataactatagttattaattgtagttaatttataaggagtagtatgaaaagtcattatttaacattaaaccaagctcattgggataaacaagccgcaatgcaaaatcaatggtctaaacccgtggacgataaagaaattatcgaggcaaaaaaaggaaactggaaagtacatttaacgccgaatcccgttaaaaaggagtggttagcagatattaaaggtaaaaatatactctgcttagcttcagctggtgggcaacaagcacctattttagctgctgctggtggtattgtgaccgtttttgatttatctgaagggcaactgagtaaagatagtcaattggcacaaaaacatcagttagctttaactactcaacaaggggatatggctgatttatcggtattttctgatgaaagttttgatattgtttttcatccaatttcaaatctttatgtacctgatgttaatcctgtttggcaagaatgttatcgtgtattgagaaaaaacggagttcttatggcgagtttttataaccctgtagtttttgttgatgacagaaatcaggcattgcgtgcacaaggattaatgagaccgacttatcgtttgccttatagtgatcaaaattcattaccttcagatattttgcaagaaaaaattgcaaagggagacggacttgtatttggtcattcgttgacagatttgattggtgggcaattaagagcaggttttttattacaagattttgttgaagattttgctcctcaggctcgttttttaattgatagttatattccaacatttcttgcttcgaaagccattaaaatataataaatcaattagttgaaatattaccattacaataataaatctgttttataaatatcttaataggataggagataagaaaatgaacaactgaacgtgtgtcacagcatcgaataatacataaaaaacgccattattttcactttaaataatggcgtttttggtgttactcgaaatggcttatttggcgctgttattgctacttttacgatgacgaatatacatcacaatagagccaattaaaccggcagttaatagtaatactggtaatgtcataagaatattcatcaccaatgtttcatgtttttgaataaaagggatcaggttcagtatataacctaatgagacaataagaccgacccataagaagccactaatccagttaaatagttgaaagcgacgttgttgtaattcagataaaccggccaaagttggtagtaatgtacgtacaaaaccgataaaacggccaattaatagtgcgtacaggcctcgacgatggaaaagatcattggctttatggtgatattgttcgggtaattgagccatccaacgtttgaccactttagtatcacttagccagcggccttgcagaaagccaagccagctaccaatactcgcggcagtacctaacacaataatggttggcaagaaatgtaaaacatctttggcaattaatgcaccacagagaattaataatgtatcgccgggtagaaatgcggcaggtagaaccccattttccagcataataataacaaaaagaacaatataaataatccacaaaatatttggatcagctagcaccatataatcatgttgcagtagcgcgtgaattatctcttttaatgtacccattcggcgaactcgcatcacaaaaaaactatatgagagctattctaacgtaaaaagaagatgatcgtttgatttaatccctgtgaaaccacagggatagcttttttttaataaaaaaagagatgaattagttagaaatacgtaaaaatgcttgctctagatcttcaattaaatcatcaatattttctaagccgatatgtactctaaataaggttcctgcgagagtgggctgagtgtcatattgtcgcatcgctttaatatcattgggatgatagcctaaaataagagattcaaatccaccccatgaaaaggccattttaaacagggataagttatcaagaaaacgtgaaaattcctcagtggtgaggatcttttttagactaaaagagaacaacccattacttccagtaaaatcacgttgaaaataggtgtgccccggacaagaagagagtgctggatggtagacattatccactagcgggtgctgttttaaccaacgcgcaatttctaatccactttgctcatgttgtttcattctaactgctaaggttcttaaaccacgagctgccatataagctgtatccggatctgcgcactggcctaataaatacgtgttttcacgtaattgtggccaacaacgttgattagcaacagcaaaacctaacataccatctgagtgaccaataatatatttggtcgctgattggatagaaatatcagcacctaaagtaagaggtttaagtaataaacctgctgcccacgtattatcaatcattataataatatttgggttatagtgtcttaccgcagtgataataccttgtaaatcttgcacttccatcgtaatagagccgggtgattctagaaaaacaatttttgtttcagggcgtaataattgactaatttcagtgccgattaagggatcaaaataggttgtggtgacagaaaatttacttaatatctgatcacaaaaattttgcgtgggatcgtaagcggaaccagtcacaaggatatgacaaccttgttcaataaacgcaagaatagattgagtaatagccgccgcacctgatggaaataatgcgcaaccggtcccttgttctagttcggttagtgcctcttgtagtgcaaaatgcgtggtagtacctcttcgcccataaaatagagctccttcagctcgtttttgggtggcttcacgtttttgggcaaccgtatcaaaaataaccgatgaagttcgctgtataatagggtttactgcgccttgtgaatatttttttgatcgaccacttaatagcagtgaggtttctggttttttttgcgtcatccgttatacctacttgttatgtaatgatgtgtttaccccaagttaatgcattttttactgaagtacaaaagaggatcgcgacagttgataaaatttcacgttatatgaaataacgaaaaattgtcttaaaaatcgacaaatgaaaaaaaaatggctaaatagtaatgataattactatcaaaatgcttcatgtttgatatcatctgagcgtttctctttttcctgatggcaacaggatgattgtaaataaacgattttgggtaagtagtgaaatagaaacttcattactgaatagataattagataagaaagagagtaaaaggccaactgatgcgtaatttgacagcttctattatattggcaatcggtctgacaggctctgcttttgcggatacgacaccggctaagcaaactgagcaacctgcgactacggccacttcttcaaccgcttctacacagggaacggcgactacaacgattgcaccaacagcagaaaatacggcaacgccaacgggggaagcagccaaaacggcaacttctgaaacaccagtggcagaagagaatacatcgacgagcacaggagatgctgcacagacagctctagagccagaaaatgccacgcaaggtgcgacacctgaaatcgtcactggagggggatttgctgaagatctctctgttatgggaatgtatcgcaatgcagatctcgtggtaaaaagtgtcatgatcggtttgctactcgcctctattgtcacttgggcgctgttctttgctaaaggtagctacttattagcattacgtcgtcgtttaagaaatgaaagtgcgcaattagtagaagcgaaatccctcaaagaggcattagcgattagccaaaaatttggcaataaaagtgcgacagccgatttttttaatgatgctgaattagagcgtacttactctcaagatagtcacgttgcatccggtattaaagagcgtgttgagatgcgcatggagcgtcgtgtcgcggctattattcgtgaattaggacgtggtaatggttatttagcgaccattggggcaatttctccttttatcggtttgtttggtacggtttgggggatcatgaatagttttattggtattgcgcattctcaaactaccaacttagcggtggttgcccccggtatcgcagaagcattattagcaaccgccatcggcttgattgcagctatccctgcggtcattatttacaatatttttgcacgtatgatttccggttatcgtggtgaaattggcgatattgcaacaggtgtagtgaccttagtcagtcgtgacttagatattgaaaacagcaaatcaaggtaatgaattatggcaatgaatcttggtaatgattcaggtgaagataatgaattgcatgatattaacgtcacaccttttattgatgtgatgttagtactgctgattatcttcatggtagcagcccccttagcgacggttgatattaaagtcaatttacctgcttcgagtgccaagcctcaacctcggccagaaaaacctgtttatttgacgattaaatcagataaacagatttttatcggtgaagagatggtaactcatgagacgatggccagtgtcttggattctatgacgcagtcgaataaagaaacgactatctttttccaagccgataaaacggtcgattatgaaactttaatgggggcaatggactcattaaggaaggcgggatacctcaaagtagggctagtggggatggaaaccgtatcatcgggtaactaattttttacttatattatacttaaaaatatcagcactctatcagtcatattgtaatgattaatagagtgcttttttattcactaaagatataaatatggttatctttttgtactatttatttttctagtatattaatagttgcgctaaaataaaatttagctttagtgttaaatgttattaatcgtctttagattaaattttgtatagtagtattaattaaattacttaagtgattatgtgctgaatcaattaataataagtagatactattattaaagttccaatagtatcaatattcgttaactattcatattttttcactttttatttgataaatatttttgttcttatggtaaatatgactataaccacatgattaataatgtttttattgctatttggtttaagtgtaaaaaaacttgcgcaaaaaattctattggatataatgcattccagttacaaattgaaacatgttgtaacctgtaacaacgcctaatttatttattatctaagtttccgttttggttacttactttttttattacaccaggtagatcgttgttttcagtcattcaattactgataagttgattttatttacttatctatactgcaacggatatttttgtcggttgtgagtaaaatataaagagaaaggcagagaactacacatagcatttttattattttaataaatttaaaagccatagtacttcgcggtactatggctttttgttttattacgcagcaaatgtgtgtttcatcttgtctagagcccgcttataccatcggttgttttctttctttctatctatctatctatgcaagtcctgctacaccaacaaattgttaacactcttcgcgaggcgtttttagattttgtgacacatttttctgctattgtgccaaaaacacattattactttgtctttgtcagtatcaagcatcaatttgctaccaatatttaacatcaaaattgagttagcgttatccaactagcaaaatcgcaatgttataaaataaccattagtaataatttcaaaataatattaattagctattgtggagtatttctgggagttaaccaccggttgttataatggattacttatctaacaagtcgtttttacgacactaaattgttattccaaaaacgaatatacttataactatatgaaaaattatgagaaaaacaggttgatcgctggttaaaatatagacggtttaagtattgattacgataaagtcatcaataaagatcgtaatgaagataactttgttgattaatcaatctagtaatgaaattagagatattaatgtaattatttattatttataaaatccagtttttaacaatttatataatgtaatacaaaggttgataatatgaaaataaccatcatatttataattaaaaaaatatattaagttatttataataatgtgggttgaaaattagaaataataaattattatttttgtattattttaaatatattgtcttataaattgattgttttttgtgttttctgtatctatttgattttaaatgatttgtattatttttaattagctcattttttgataataagaattattactacttattttatcattactatataaagaataattaattttaaattgaccatatatattaaaaatccatcttaaacattaaatagctgaaacgttttttctcgcataaaagaataatttattttttaatgaattatcgcttgataatgatcaagtcattattgtgtcggagtgttaaaaaggcggtgttttaaaattattccaattaaaaatcatcatatcaggagagatatatggccttggggaataatgttttttcccaacatggtattaaccgacgcgattttatgaaattgtgcgcagcgttatcagctaccatgggattaagcggcaaagcagccgcgcaaatgtcacaagcaatgacatcacctgaacgtccacctgttatttggattggtgctcaagagtgtacaggttgtacggaatctttattacgtgcgactcacccaacacttgaaaaccttgttctggatgttatcgcacttgaatatcacgaagtgctctcttccgcttttggttatcaagcagaagaaaacaaacataatgcgatggagaaatacaaaggtaaatacgtccttgttgtcgacggttctatccctgacaaagatggcggtatttactgtatggtggcaggcaaacctattcttgagcatatcaaagaagccgctgaaggtgcggcggcaattattgctatcggttcttgttctgcatggggtggtgtgccagcttctggaggtaaccctactggcgctaaatcactggaagctattttaccgggtaaaacagttatcaatattccagggtgtccaccaaacccacataacttcttagctacagttgcacatattattacctttaattcattacctaagttagatagcaaaaatagaccgctatttgcatatgagcgtctaatacatgaaaactgtgaacgccgtcctcattttgatgcgggtcgttttgctaaagaatttggtgatgaaggacaccgccaaggctggtgcttataccatttaggttgtaaaggacctgaaacttacggtaactgcccaacattagagttttgcgatattggtggaggaatttggcctgttggtattggtcacccttgctatggctgtaatgaagagggtgtcggatttacgaaaggtattttccaacttgcgaatgtttatcagccaacaccaaaagcacaagtacccgatgttaacgccaaagaaggtggtggtgtttcttatggtgcagcaggcttattaggtgcagttgttggtgctgttgctggggtaagtgtgatggctgtgcgtcaattaggccgtgacaaaaataccacaggagcctcacaggaggataaacggtgaataggcgtcatttctttaagctggcatcaggtggggttctccttgcgggaatggcacccactgcgagtcatgctgcggcgcagaaccgtcctccaattcctggggctctcggtatgctctatgactctacactctgtgtaggctgtcaagcatgtgtgacaaaatgtcaggaaattaatcatccggaacccatggagcgtggtgatacttatgctaatggtgatccgatctggtcaaacaatgacaaactaagtccttacacaaataacattattcaaatttggcgtgatggaacaggtgaaaataaagatcaactggaaaacggttatgcctttattaagaaacaatgtatgcattgcgttgatgctaactgtgtttctgtgtgtcctgtttcagcgttaaccaaagatccgaaaaccggtattgtgcattatcatgcagatatctgtacaggttgtcgttactgtatggtgggttgtccttataacattcctaaatacgattatgatgatcccttcggtaagctttataaatgtgaactatgtaaccaaaaaggggtagagcgcttagataaaggcttattacccggctgtgttgaggtttgtccaacaggtgctgtgatttttggtactcgtgaagagttgcttgaagaagcaaaacgccggttagcgaaaaaagcgggtgaagaatatcactatccacgccaaaccattaatggtggcgatacttatctacataagatcccagaatatcaagatcatatctatggtgagtttgaaggtggtggtacgcaggtgatggtactttccgcggtgccttttgaaaacctaggtatgccagaagtggctccattatcaacgggtgcgcgttctgaacatattcaacatacgctgtataaaggtatggttttaccaatagcagcgcttgcgggcattacttatttggttaaccgtaatagtaaaaaacaagagcaggaacaccataaggaggataacgatgtcgagtcatgatcctcgtccacttggcggtaagttatttactttagctgttagagtgtttttaccgcttgctgtgcttggttttattcttattggtaagcgtttggtattgggtcttggggatgtttccgatctaaatggcggttatccttggggtatttggatagcctttgacttacttatcggaacaggctttgcgtgtggtggttgggcactggcatgggctgtttatgtttgtaataaaggtgaatttcatcccttagtacgtcctgcattattagcgagcttgttcggctattcgttaggtggattatccattgcaatcgatattggtcgttactggaacatgcctcacttctttatgcctcaatactttaacgttaactccgtattgtttgaaacagcaacttgtatgaccatctacattatggtgatggcattagagtttttacctgcactactggaacgtttaggttggaaagtttcgttaagacgccttaataaagcgatgttctttattattggtctaggcgccttattgccaaccatgcaccaatcctccatgggatcattaatgatttcggcaggttggaaggtgcatcctctgtggcaatcttatgaaatgctaccgctgttctctttattaaccgcctttatcctcggtttcactattgttatttttgaaggttctttattaaaagcgagccgtactattaatgacgatgaaacaccgctatttaccaagttaactaaaatcatagaagtacttctgatcaccttcttggtattacgttggggtgaagtgatctggaacggtaagctgagttatatcgctaaaggggatatgttctcttggttattccttgcagaaagtgccttgttgtttattcctctggtattgatgcacctgaaaaataatcgtcgtagcccaagaatgttatttgtctgcgcattatttatgttagtgggtgcggcaatgtggcgtatgaactattcattagtcgcttataacccaggcaacggctatcactatttcccaactgcaagtgagttgttgatttctattggcttcgttgcattcgaagttactgcttacattcttattatccgtttactgccggtactaccagcacaaacagagtcaaatatacaattaaaaaaggctgaggttaaatcatgagccaacgcattactattgatcctattacccgtattgaagggcatttacgcgtcgactgtgaaatcgataacggaaaagtcgttaaagcttggtcttccggtactatgtggcgtggaatggaggagatcctaaaaggaagcgatcctcgtgatgcatggattattgtgcaacgcatttgtggtgtttgtacaacggttcacgcaatagcctcagtacgtgctgtagaagatgccttagggatggatattccggttaatgctcagtatatccgtaacttaattctggcttctcacattattcatgaccatatcgtccatttctatcagttgtctgcgatggattgggttgatattacggcagcattacaggcagatcctgaaaaagcctcagcgatgcttaaaggggtttctcaatggcaattgaactctgctgaagagttcagaaaagtgcagaagaaaattcaagatttggttgatagcggtcagttaggtattttcgctaatggttactggggtcactcagccatgaaattacctcctgaagtgaacttgattgcggtagcccactatctacaagcattggaatgccagcgcgatgcaaaccgcattgtggccgtgttagggggtaaaacaccgcatattcaaaacttagcagtgggcggtgttgctaacccaattaaccttgatgcaccgaatgttctcaatttagaacgtttaatgtatgtaaaacactttattgataacttgggtgattttattgaacaggtttataaagtggatactgctatttttgctgcttattatccagagtggttaaaaatcggtaaaggggctaattactacttatctgtgcctgaattgcctattaatggcaataatactgagtttttactctcaggtggctatatggaaggcgttgatttttctacttatcgtccaatcaaagattggaaagatcaaaacctgaaagacggcattgaagagagtggtaaacacgcatggtatgaagatgatgaaccattaaaaccatgggaaggtttaactcgtcctaaatacaccggttgggatgaaaataataaatactcatgggttaagtcacccacattttacggcaaacctgtagaagtaggtactttagcatggttagtgtgtggtttagcgggtaaacatgaaggcacagtaaaacactataacgaagttaatcagatctacaccaaattaaccggtcaaaccttggtgacagagcagttagagtcaacttggggacgcattattggtcgtaccgttcatgcttgtgtattacaagattcgcttaacttcttatggcaatcactggttgataatattggccgtggagatactgcttcctttattaaacctgagtttgagccgggtaaagagtatcgtggcgtcggttttgaagaggcttcgcgcggtatgctatctcactggatagtctttaaagatggcaaaatcacaaactatcaggcggttgttccttcaacatggaatgcgggtcctcgtaactttaatgatgaaccgggtccttatgagttatcactagtgggaacgccggtggctgatcctaacaaacctctggaagtggtaagaaccattcactctttcgacccatgtatggcttgtgctgtgcatatggttgatttaacaggtaaagaattaagtaaggtgaaggtattgtaatgcgtacacttgtcttaggtattggtaatttattactaagcgatgaaggcattggtgttcgtatcgtagaagcgctcgaagagcgcttctctttaccggagaacgtcgatgttattgatggtggcacatcaggcatggaaattttgcaagatattgctgcaagagatttattgattgttgctgatgcagtaagaagccagcacgagccgggcagtatctttgtattacatgatgatgatgtacctgcattatttacccagaaaatttcaccgcatcaactcgggctatcggatgtattaatggccttacgtatgactgatgaatttcctcgcaaactgattttagtgggtattgaacctgcttcattagcgccaagtatgtcattgtcagatattggtcagcaatcgatggaaatagcacttgaacaagtggttaatattttgcgtgaacatgggatcaccgtaacccctaaagaggtaacagcatgagtgaattaaattgggatatcacgggatacgatgaaccacctattgaattacttgaaagcagttttcgagagattgccaaaaaagagatgcaagcattgcctttttatagagaaaatattcccgtaaaagcgggaggatttactttatttgaaaagcaatggattggaacaattttaacgccttggatgctagagcttattgtgttgcccgggccatcacaagagtggccaagacgtaaaattggtgagcgtatcgccttagcgcttccttgtggtcaggttaaatttgtcgttggtgaacttgctaatggtgctcaatatctggcttgttcattaatgtcgccacttgatcgccatttacaaggtgagcaagcggttgagttggcagaaaacagtgcaaaaatggctctttctcttcctgttcagacacaatccgtcacagaagttgatttaagtcggcgttccctgtttcgtggtcagttaagatcataatgtagaacgtttacgcgacaccgagtcaaattcttcttattgaatagtcaggagtcagaatatgtgtagcacttgcggttgtggtgaaggtaatgtcagcattgaaggcgtagcgcctcattcacacgatcaccaccatcactctcacgaccatgatcatcacgaccatggccatcaccatcacggtcatcaccatcatcatgggcatcatcatgggcatgatcatcatcatgaacacaatgctactccagcgaatactgttcataaatatattgataagtctgagcaaaagcataagcacaattacgaaactcatggtcagcctatcattattcatcatcaccattaccataatagtggcgatgttcatctccatttttatcatgatgcacagcaaaatgaagcccaagtgttccatgagcatcatcatgggcatgacgatcatcatgcacattctcatgaacatactcatagccatgaacatgaacatagccatgatcacgaacatagccatgaacacgaagaacaatttagtccagttattgataatgacaacatgcattatgggcaaggggaagctggtactcatgctcccggaattagccaaaaacgaatgttaaaaattgagatggatgtactggataaaaataatcgaattgccgttcataatcgtgaacattttgcccagcaaaatgtattggcgctgaatttagtttcaagtcccggctccggtaaaacaacgttgctaactcaaacgttaaaacagctaacacaacgtgtaccttgtgcggtgattgaaggtgatcagcaaacgacgaatgatgctgatcgtattcgtgaaaccggggttgctgctattcaagtcaatacgggtaaaggttgtcaccttgatgcacaaatggtgcatgatgctacccatcaattaggtttaaaagacaacagtattctctttattgaaaatgttggcaatctggtttgccctgccagttttgatctgggtgaaaaacataaagtggctatcctttcggtaacggaaggggaagataaaccattaaaatatccgcatatgtttgccgctgcagatctgatgattatcaataaaattgatttagtgccacatcttaatattgatgtgcaagcgtgcattgaatcagcgcgtcgcgtcaatcctaatattgagatcattgcattatctgcgacaactggcgaaggtatggaagagtggttagcttggttggagagccgtttatgtgcttaggtgttcctgccaagatagttgaggtgggcgatgacgtccaccaactcgcttatgctgaagtcagtggcgtaaaacgtgccgtcaatatctctatggtttgtgagggtgacccgtcagagttattagataagtgggtgcttattcatgttggatttgccatgagtattcttgatgaacaagaagctcaagatactctggatgcattacaacatgtatatggtgttacccttgaagaggctgatgatgcaatacgttgatgaatttcgtgatcccgaattggccaaagcattattagctcaaatacgtgaaactatttcacaatggccccatcccatcactcgtccattacagattatggaagtgtgtggcggacatacgcatgccatttttaaatttggtctcgaccgcttattaccacaagagattgagtttgttcatggtcccggttgcccggtatgtgtgttacctatggggcgcattgatgcttgcttagaaattgcagcccgtccagaagtcattttctgtactttcggtgatgcgatgcgggtgcccggtcgtcatggttcaatgcttgatgctcgtcgtcgcggtagtgatatccgtattgtttactcaccgcttgattcattaaaaattgcgcaagataaccctgataaacaagtggtattttttggcttaggttttgaaactaccatgccaagtacggcgatgacactgcaacaagcgaaattacgtggactgaaaaatttttcgctattttgtcagcacattactatcgtaccgactttacgttgcttattagagcaagaagatgtacgtattgatggttttattgcccccggtcatgtcagtatggtgattggctgcacgccttatcaacctttatgtgatgaatttgaaaaaccctttgtggtgacaggttttgaaccgttggatttattacaagctatactgatggtagtaaaacagcttaaagcaaaagctgagaatgcagattatgttttaagtattgaaaatcaatatagtcgtattgtccctaatgaaggcaataaacttgcgcaaaaagcattgaaagatgtttttatgctaaaagagagcagtgaatggcgtggacttggggagatccctatgtctggtattcaactaacacccgcttatgctgagtttgacgctgaacgacgttttacaccagcaccacaacaagtggctgataatccacaatcacgctgtggcgatgtattaaccggacgatgcaaaccttctgattgcccattatttggtaaaagttgtacaccagaaacggcattaggtgccttaatggtgtcatcagaaggtgcatgtgcggcttattatcagtatcgccgtgaaggtaatatatgaaacaacctgatgaaatcaccttagctcaaggaaatggtgggcaaggtatgcaacaacttatcgaagggctatttttgaaagcattcgataatccattattgaatgaaaaagaagatcaggctcgtattgcattagccgatctcacagcacagggcgatcgtctggcatttagtaccgacagttatgtgattgatccgatcattttcccaggtggaaatattggtaaattatctgtttgcggaaccgcgaacgatctttctgtaggtggagctgtacctcgctatctctcttgtggttttattttagaagagggacttgcttttgaaacgctagaaacattggtgatggcgatggcaaaagccgcacaacaagcaggtattcagattgtaacgggggataccaaagtggttcctcgtggtgctgcggataagatcttcattaatactgcgggtattggggtgatcccaagtaaaattgattgggcagcaagtcacattaaagccggcgataagatcatcgtcagcggtacaataggcgatcatggtgccactatcttaaatttacgtgaaaatttaggattggaagctgatctgcaaagtgactgtgccgtgcttgaaccaatgatcgcgcctttacgtcaaattgacggtattcgtgcattacgtgatgcaactcgtggtggcgtgaccgctattttacatgagttttctcaagcctgtggctgtggcatgaatgtatatgaaaacaaactgccaatgaaacagtctgtacgtggtgtgtgtgaattattagggctggaagcactcaattttgctaacgaaggtaaaattgtattagtcgtgtcaccgcaagcagaaaaacaagttcttgaggctttgcatcaacatactttaggtcaagatgcttgtaccattggtgaagtaactgaagagcgttatattcgtttaacgggaatttttggcacaagtcgtattttagatctcccttataacgagccattaccccgtatttgttaattaaatcaaatcactcaactgatcttttaaatactcataagttatttctctgttacagaagtttgttataacgcaaacttctgtcatttatcttaattctgatcctttgataaaaatatttttggagtaacatgttcgaccaatcctactgcgtggagagggtctctcgtgggggtaagttctagggaaaaacatgtcttggtcagaatttaaatctcaatacctgatccgtttctggaagcctcttccggcggttattgcagcaggtatcttatctacttactactttggtttaaccggcactttctgggcagttactggtgagtttactcgctggggcggtcatgtgatgcaatggtttggtgcgcatccagaagaatggggttactttaaaatcattggtcttgaagggacaccactcactcgtattgatggggtaatgattattgggatgtttggtggttgtattatggcagcactttgggccaataatgtcaaacttcgtcatcctcagcataaagtgcgtattcttcaggccgttttgggcggtattattgccggatttggtgcacgtttagctatggggtgtaacctcgcggcattctttaccggtattcctcaattttcattgcatgcttggttctttgctgttgctactgctattggctcttattttggtgccaaactttcattaatgccactatttcgtataccggtaaaactgcaaaaagtcagtaaagcatcacctattacgcaagataaacaacgtgcaaaacgtcgctttcgattggggatggttatcttttttgccatgatcgcatggtcattaattattctatttgattcacccaaactcggctttgctatgctggggggaattggctttgggatcttaattgaacgtgcgcaaatctgttttacttccgcatttcgtgacttatggataaccggtagaacgcatatggcgaaagcgattattatcggtatggcagtaagtgcggtgggtatttttagctatgtacaattaggtgctgcaccgaaaattatgtgggccggtcctaatgcagttattggtggtttgttgtttggttttggtatcgtgcttgctggtggttgtgaaacaggctggatgtatcgtgcagttgaagggcagatccacttttggtgggtaggtttaggtaacgtgattggttcaacaatactggcgtactattgggatgatttttctgcggtactggctaccgactacgataaaatcaacctattagatacctttggtccagttggtggattagccatcacctacctgctacttggtctctcttttatattactactttggtgggaaaaacatttcttccgcaaaagagcgcaacaagcgcaagcgctttcaacacaaattaataaggaaatcgcatgaacgagaaaaaaaccatagtgccagattatcgtcttgatatggtcggtgagccttgtccttatcctgcggtggcaacattagaagcgatgccgtcactgaaaaaaggtgagatccttgaagtggtaagcgattgtcctcagtctattaataatattcccttagatgcgaaaaactacggttataccgtattagatattcagcaagatgggccgacaatacgctatttaattcaaaaatagcggcggaataattgataaaaaaacagcctgatcatagcgtgagataggctgtttttttgtactatgatatcgggtgataaaattactcggcttcaccaccaagtacttcgataaccctttcaattagcgcgcttagttcacctgtcattaagacaaaatcggcatcaaaacgctgggcaaaatcggctttatcaatatcatcgttttgctcacgcaaggtatcactaaatttaatgcgcttgatagagccatcatcacaaagcatgaattgcaggcgatcttcccaatcaagagaaagcttggtgacaaacttaccggcttcaatatgagtggcaatttcatcagagacaagctcttgtttcttacaacgtatcacgccaccttcttctaataccgctttaagctcggcttcatccattaatgtaaaaccagcagggagttcaccggaacgaacccattgtgtcatttttgattcgacagactcattaaaattgagtggaaccacgggtagcgaacctaatgttttacgcaataaggctaaattatcttcggcacgttttgcactacctgaatcaacaatcactaattgtttatctaaatctaaccaaataaaggtttgtgagaatttgctaaatgcgcgaggaagtaacgtgtggacaacttcatcttttaatgtcgctttttcggttttctttaatttacgaccttgttcaccctctaacttttcaactttatcttgtagcgcttgcttaatgacggtggcggggaggatcttatcttctttccgtgcgcacatcatgacttgtttacctgcaacatggataagtgcttcgccacgatcacccataggtgaaacccaacccgttttggtcatatcttggctactacaaggggtgaatgctaatgaagccagctgttgttctaactcatccattgacagcgctatctctttatttaagcgatagaccaaaatatttttaaaccacagcatctgacattccccttaatcatgattaacagcaatatgatactgaatgttagcagtatctaaaaggtaatatcctttaaaagaaatttattatcggctcacagtataaaaacagtgttcaagctgaatcgaataattagtaaaattactttatgaaaatgagttttattcttatttgttgctaattaacttatcgttttacgggagagataatctaaatctcaaggattgtcgtaatgtgataattatcacgtagttgggtttttatcctatttttgaacgctttctttgcaacactttcagatttatctctgcattaatttacaaaagaaaatttatcttgacgattggatgtgatttttatcacagttttaagaaaaagtaacaggttgtttttcatggtaacgatggtgatctaaatcacaaatataaatatttttttgcggaaaattgacaaaaacgcataaatagcctttttatgttaactatggttatagtttagctttagttatgattaatagaatccgtcgttcataaacaaacattgattagagattgtaattaaaccttactcttgtcctatcttggttgatatttttagttaattatccttataaagtgtgtaggtcattcattactgcgagttaaattgtagttaaatttatttttaagcttatttaaataacaagtaaatataaaaatagaaaattatagaattgagataataatatttaaatctttagggttatttatttagtggttaaaaataatacgtccttttaaatatattaaatagcaaggtaaatttttttattagcaaaaacattagctatgtaacaaaatgaaatataaaagaaaaattaaaaaatggtattttgaaaaagttgattaagttcaaaaaatacgtatctttaagcttaattgtgaagctcatcactcaggtatgtaaccatgaaaatatactttgatgtaattgtgggctatatcacgaaagttaggcttttttttgagtaacatgccagcgaaaattcaatgctctactcgattcgtggatagaaataaaagcaatgcccttatttaaatagtaatgaggacattatttttgtgtcttattggtgaatatctctgtgtcaaggaaattaaagcctgtaagaaaattaagtagagtaataatagcagttataaaaatgaacggttgtaaaagcgattttcttgtttgagatccgtggcggcggctctttgaactgaaatcagggttaatcatagacggcggtattatttttaaccttagaaagaaaatcataaaactatagaaaatagatgggtattttaatcatgaaaagcttaaagcctttagcagcgctggtaggtttattggttctgtcgggatctgcaaacgcagtaaatgtgtacaacgataaaggtacacgttttgatgttaacggtcagttccgtttaaaaacgcaagtgacaagtaaagatcatgaaatgcgtatgcgtgatgatggtagccgtatcggtttctttggttcccatgaactgactaacgatatcaaagtgtttggtaagttagagtggggttcagatactcaaaaaaccaacagtgataatgagaaaacaaactttgatctgtacaaccgcgtaggctatgtcggtttttctcatcgtgattatggacaaatccaatttggtcgtacttatatcccaattgactgggtaaaaaaatcaagctacggctatggtaatacaggggtattttactttagtgatgtattaggccgtgcagtaggttattcaagtaaaggggttggtaaaaacaactttatgacccgtttaccacaaactatctttattgaaacaaaccgttatgaaggctttaaattagcggcaactttaacgggtaaagatggtaaagataatgatggtgatggaaaaaatggcgatcgcagaaccggtgatatccgtcatgcctattctgtcgttggtttctataaatcaactttcggtttagagtttgatgcgggttactcagcagctgtaggtgagcctaatctatacccagatagtgttgttggtaataaaaaaccagaaaatagtatcttagcattcggtgctgaatacttcttccctggtcgcgaattctctatcggtatcgactatggtcaatctcgcggtaaaaatactggcttaaccttaagagaaggtgcaactgagaaagactataaatggaactcagttaaaggcgattggaaagcgaatttatatggtgttggtgtgaaatggcactgggatcgtatcgaaagtggtatgtatgcgggttattacctgcgtgatggcgatgctaacactttcaactacaaaaaagaaacctatactgtgggtgtagataaacgttttgcggtatctaaatacaacaacttacgtttattcgctgaaatggcatatgatgatgctcgtagcgaaaacccagcttatgaagataaaaaacaatatatctttgaaactggtatgcgtctgtacttctagttttatcaaagcaagtattgtttgacagaagtaataaaaggagagcaactgtgctctcctgttaaccaatatataaggggtgtgtaatggttaagaatgtgttgaaaatctcaacattagcaatgttggtcgcattcaatgtgaatgctgcgacagtcgatctccgtattatggagacttcggatgttcacagtaacttaatcgactttgactacttcaaagacaaaccaacagaacagtttggttatgttcgtacggcaaatttaattaaagccgcgaaagctgaagcaaccaatgcgattttagtggataacggtgacttgatccaaggtagtccactggctgactatcaagcagctaaaggcttagagaaaggggaagctcatccagcgcaccagttaatgaataccatggggtataccgtaggtaactttggtaatcatgaatttaactatggtttagattacctgaaaaaagccattgcgggcgctgaattcccatatatcaatgccaatatcatggatgcgaaaacaggcaaaaactatttcacaccttatatcattgttgatacaccagtaaaagatcgtgatggcaaagagcacactatcaagattggttatatcggctttgtaccaccacagattttaatctgggataaagccaatctggatggaaaagtcgttgtcaatgatattacagaaacagcgaaaaaattcgttcctcaaatgaaaaaagagggtgcggatctgattgtggctatccctcactctggtttctcttctgaaccttataaagctatggctgaaaactcagtctattatctgagtgaagttgatggcattaacgctattatgtttggtcatgctcacggcgtattcccaagtaaagaatttgaaggcattaaaggtgttgatgttgctaaaggcactgtaaatggtgttccagcagtaatgcctggccaatggggtgatcacttaggtgttgtcgatatggttatcaataacgacagcggcaaatgggtgatgacccaagcaacgggtgaagcgcgtcctatctttgataaagcaaacaaaaaagcattagttgaacgtgatgccgagttagcgcaaatcattgaaaaagcgcaccaaggtactcgtgatttcgtcggaaaacatattggtaaagcgtcagctaatatgtatagcttcttagctttagtacaaagtgatccaacggtacaaatcgttaacgatgcacaggttgattatactaaacactttattcaaggtgatccgaacttagacggcctgccagtattaggtgcagcagcaccatttaaagccggcggacgtaaaaatgcacctgcagacttcgttgaagtagaaaagggtgacttaacattccgtaacgcagcagacttatatctgtatccaaatacattagtggttgtaaaagcaaccggtgcagatgttgttgagtggttagaatgttcagcgggtatgtggaaccaagttgatcctaactcaactaaaccacaatacttaatcaactgggatggtttccgtacttataacttcgacactatcagtggcgtagagtataaagttgatttaactcagcctgctaaatatgacgttgattgccaagttgtcaataaagatgcaaaccgtatcaaaaatgtcacttaccaaggcaaacctatcgatcctaaagcaactttcttaattgcaaccaataactatcgtggatacggtggtaaatttgcgggtacaggtgaaagcaatatcgcctttgcatcaccagatgaaaaccgtgcaatcttagcttcttatattgctaagcaaacgaaagaaaatggcgaagttgcaacaaaagctgcgaataattggtctttcttaccgatcaagacagataaacaattagatgttcgctttgaaacttcaccaagtgaaaaagccgctaactttattaaagattttgctcagtatccaatgacctttgtggaaaatgacgatatcggttttgcaatttacaaaatcgacctaactgagaagaaataatcttatagacctgtccattcgggcaggtcgttctcatgttttggcgtgaaagagtgcagttattgctctttaaggggattttatgcgctttataaagctattacctgctattttagctgttattttagcgggttgtgtgacacaagcacctgaagttaaacaaccattaaaaccgcaagcaaaattagttgaaggcgtatcttgtattttacctgatgtacctactgccaattatgactatattgcgacaaatgatcgttatggtcaaaatagtaaagcatcaacagattactttaaattagccattaattactcaccggctttttgtgattataaaaaaaataatattaagcgtttaaataacgataacgaaaaagagcgtgctaaacgcgaattcgataaatttgaaatccagtgtttctcagataataaatttggctggattgttcatgggctatgggctgaaacctgcgatggtaaatcatgggatgaatgccgtgactggaaagacatacgcaagcatcctcgtttatgtaaaggggatttaccaccattagaatactcagcgattaaaccttacttatgttcatcaccgggtatcgacttattgcaaggtgaatgggaaaaacatggcgtttgtgcctttgatacgccagaagcattctttggtcagcaacaagcgttatttgacgcattagtgttaccagaaggccgcccttcaaatagtgaattgattaagttcttaaaagaaaataatccatcattgaaggataaagaaattcaaattaatcgagatgaattctatatttgttatagcaaagatttcgaagtgattgattgtccgaaacgtgaatattgatctagggataaaacttaaatgaaccataaatataaactcgtagcccttgcagtaagctccgtcttattagcaggttgtgctaaaaattatgacgaagcgaacgtcgttgatgtccgagtgattgcactcaatgacttccatggtgcattaaaagcaccaggtccaaacaagcctggtggtattgagcatatggctacgctggtcaaagagctgaaaaaagataacccaaataatattgtggtagctgccggtgatatggttggtgctagcccactgttatcttcaatgttccatgatgagccaactattgaagcgctgtcattagcaggtttagaagcaacttcagtgggtaaccacgaatttgataaaggtatgggtgagttactgcgtaagcaaaacggtggttgccatccagttacaggttgtcaaggtcctactgaatttaaaggtgctgatttccaatatttagcggctaacgtgactgttaacgaaacaggtaaaacgttattccctgaatatgtgattaaagagttcaatggtattccggttgcctttattggtttaactttagaaggtactgcggctatcgtgacaccaaaaggaactgaaggtttaagcttccacaatgaagcaaaaacaatcaacgctttagtgcctaagttacaagctcaaggtgtacaggcgattggtgttctgatccacgaaggtgctgcacagcgccgtgatggtggtccagtaaatatcaacgcatgtaatggtattacaggtaaagtacttggtgtggttgaacaattagatccagcggttgactttgttgtaacgggtcatactcaccaagcttataactgtactattaacggtagatcagtgacttctgcacaatctaatggcgccatgttaacgcgtatcgacctgaaattagataaaacaacgaaagatgttgttgatgtagaagcgcgtaatatttgggttgataaccgcaaatatgaaaaagatcctgctgtcactaaactgttagaagcttacgagaaaattgctacaccattagcgaaccgtattattggtaaactagaaggtaacttaaccaagcaaactaacgatgcgggcgaatcgggtctaggtcaagttattgctgatgcccatttatatacggcaaaaccaaaagatatgggtggcgcacaaatcgccttaatgaacagtggtggtattcgtgctgatatgacgggtggtgatgtttcttataacgctatttataccgtacaaccattctctaatgtactgttaacacaaacattaacgggtgagcagatcaaacgcttattagagcaacagtgggatcgttcacgtccacaagtattagcggtatcgggtaatttccaatatacatgggacagcaaagcacctgttggacaacgtgtgattgttgaatcaatgcgtattgatggtaagcctgtggatatgaaagcgaattaccgtgtagttgcaaatgaatacttagcaacaggtggtagtaacttctctgtactgaaagaaggtaaagatccggtttacagcgtgccagatgttgatgcagtagtgaaatactttgctgagcagtcacctattgctcaaccaaaagcgaacaacattactcgtaaataacatattttcatacgccttgtgaaaatagcacctcttacgagaggtgcgtaactaaataaagagagcaaagtgttgaacacaaagggtccatccctacctttgtattcattacgcactttgctctttttttatgtttttttactcatggggtgccaataagctggaactgtatttattacatataggctctcatgaaaatttttattgctccctttgttatttgtcgtgggcaaaaaaaagcccacagaggctgtgggcaaggaatgaaaataaaaagagggtatttggatcagatgtctatattaaagtctattatttgaagattttaaaacgagcgtcatcttcaatataatttttctcacttgcttcttgttcgatagagccaaagaccatttgtgctcttaatttccaatggcgaggaatatcccaagttgcgtgaacttcatcatcaataattggattgtagtgttgcagtgatgcccctacattttcagccgcaagggcagtccagacagaaagctgagccataccactggcttgctctgaccaaataggaaagttttcagcatacagtgggaactgctcttgaagccctttaacgatatcagtatcttcaaaataaaggatggagcctgcaccggcagcaaagctattaattttggcttctgttgcgctaaatgcatccgcagggactaattttttcagagtatctttaacgatattccatagtttctggtgttgttcaccaaataaaacaacaacacgagaagtttgtgagttaaatgcgctagggctttctttaaccgcttctttgatgatcgtagcaactctgtcttcgctaataggcagttgattacctaaatgataaattgttctacgttttttcattaattctgtgaatgcgttagacatgcttatctccttgataaatataagcgtttaaagctgtttagcctgagctaatctatgcacatactatagacgctgtgggtgatttattgatatctaaaaattttaaccacttacatcaaattattagagctagtctttaactgattgattttcattgctcttattaccatatctaaactcaggtgctagctgacttattcctaaaccccccgcttttttcacttttatttgtaccggaatacgctctttcatcgcttcaacatgactgatcacaccaataattttgccagaagcattaaggctatctaaggcatctaaagcaatatctagtgtatcaggatcgagggtgccaaagccttcatctaaaaagagtgactcaatttgcgtcttattactgactaaatcagataacgctaaggcaagggataagctgactaaaaaactctctccaccagaaagtgtacgtgtatcgcgtagagcatctgcttgccatgtatcggcaatctgtaattcaaggctacctgtcgttttgcgttgtaaaaagtaacgaccatgtagtttttctaagcgacgattagccagatagataagatggtcgagggttaacccttgggcaaagcgactaaatttatcaccagatgcagagccaactaactcatttaaataactccaatcatcataatgcgcttgctgtttggctatttgcgctaatagtgtttgttgctctatccgtttttcatcatcttggcgtaattgtatttgcagactaaatagtgtttcttgcaacgctttgtgttgctttgctaagtcgtctaaatggatattacattgctcagcagtacattgggttgagagtaatggttgttgtaataaatgttgttgataggctttttcttgagtctcaaggcgcgttttttcttgtaaaagtttatcaagtcgctgtttttgctgctcttgtagacgtgttctttcctctaccgataatagagaggctaaaaagtcattttcatcggcaaaaagactctcttttaacgcgtgttgatagtgttcagtggcttgttgtgcttgtgttattgctcgttgtagggctttttcattctcttgatattggccaattaattgattaagtcggttttcgagttggtttttttcttgagtatattgctcaatctgggtttgtaaaaattggctatgtttatcaagttcactacgtacctgctctacagattgtgaaccaaataaggcttgtcgttgatcctgccattgtgtttgttggtgctgttgttggcttaattttgctaatagcgcctcaagttcagcctgtttttctgctaaataacgttttttttcattttgcgtcacttgctgttcacgtaggctttgttgtaatagctgaagctcttttaactgactttgatattgctggtgctcttgttgacgagctgccaaccatggcgtgaactgctcaaattcagggagtgtatagccttgtttttcaatcgctgactgaatatgttgtgctaattgttgttgctgttggtgcaagtgctcgctttgttgctgataggttttgattgttttttgcaaataatctaaatcattttgctgttgcttaaccgattgttgttgttgattaaattgctcttttgcattgagaaaatgcgtattcttttgatgtgtttgggcttctaattgctgataactgtcaagtttttctgtgagaataagctcttgctgatttaatgattgttctaatgtcagtaagttatctgcatcatcaactaacggtaaatggtgtgcttgtgctaacgtctgccactgttgggtcagtacgctattctcttgggttaactgagcgatattgtcactcaaggtgctattttgtgagccatagtttaccagttgggttcgctgttcggctaaggtgatggtgagtgaatgcacctgctgttgtaatgcttctaaacgtagctttgtctcatctggtttgatgtcatgataggtttctacataaggatgctgtgttgagccacatagagggcaaggtttatctttcagtaaacgtgcacgctcttgctcatattcggcgactttttgtagcaaaagatagttgtcatttaaatctttaagatgttgtgctttctcttttagtgccagatcattttctgcaatcgtttgggttagagtcgctattttttgctgattttcactcaatgtagtttgataatgttgctgctctttgccattacgttgtaattgagtgtgtaaatttataatttttgccaatgcatttttttgcagattaatttgttgtaatcgcggttttatttcatcgggtttgtctgctttttgacgcgcttccaattgtgtttgataagattgtagttgctgttgctgtaaattaagttgctcttgttgggtggctaatgtttgggtagcttgttgtaatgctttttccaaacttatgactttttcctgctctgctgtttctcgtttttggttggcaagatattggtttgatatttcattatattgctgaaaatagtgttgccataagggtagattttccgcaagttgtgcatgataggcgtgttgtgttaagtcgttatttaattgattaacttgttgttgtgtggtgattaattttttctcggctaactgagaatgttgcagatattcagcgcatattttttctaatttatgcttgtgttggttattagtactaatttcttgttgtaacagcaccaattgattatctaaaggcagtaccttctcacgaattaactgtaaagtgtgctgttttttctcatgatgcgtttttaattgttcatgaaaggctgccaattttttattgataggtaggctttgttgttcaatagcctgtttttctgtttttaagcttgttaactgtgttgctaaatagttttgctctgtaagacgacgatttttttcatcataaagagggcgaattttttctgctggctcatttttttctaagcgttgaatatcgggttgagcaataattaatgcctgttgagcctcatagagtcccgcttgggctgattgttgttgttgctgaatttctagcgctttttcttgccattgcttagcaacttggtattcctgttgctctttttgtaaccttgttatttgtgtttgaatattggcttgttgtgttaatagctcttggcgtgttgttgcatccaataatgccatcatttgagcttgttgttttagcgtgtttaaagcctgctcttcttcgcgccaatgtttaaaaattgtttgtgaaatatggcgatagatatctgtaccagtaagctcttcaagtagctctgcacgagatttgtcatcagcgttgagaaatgcagcaaattgcccttgtgataacaacatggatttagtgaagcgatcgaaatctaatccggtgatcgagattattttttcttttacttggctaattttattggctaaaactttatcttcaccgcctaaacgattaatttttgctaactcagcctgtggggcttgtaagtttccctcttctttataattcgcacgacgttgttcccaaaatgcccgataggcaacccctttaacttcaaattccacttcagctaaacattctgcagtgtgacgagtcattaattcattttgagattgggttactttatctaagcgtggcgttctgtgatataacgctaaactaattgcatctaagagcgtggttttacccgcacctgtcgggcctgtaatggcaaatagtccattgctaacaaaaggctcttgatcaaagttaattttccattcgcctttgagtgagttaatgtttttaaagcgcagacttaagattttcatcgtgcgttgttatcctcttgctctgccatttcaaccgcttgcttaaagagtgtggttaaccgtattttgtcttcctcggtttcaaactggtgttgagctaagcgcctttcaaatacatcatatacagtcagttcagttagggtttctttctcattttgcatcagtgcttgacgttgttttctcgctcttcttaatacgatcacttcaaagagtggcgattgagttagctcttgaatacgggtttgaatatcactgagataatcttgagttgaaacttcaatatctagccaaatcgtggtatccatttcattatattgtgttgctaacttttcgagttgtgtggcaatttcttgtaacgagcctgaaagagtgcgtaatagctgaaactcagggatgggtaatagtgtcatttccgctaacttatcttgctcaaaatcgataagacaaacacttttctgttgtgcactttcatcaaaacttaatggaataggtgaaccactgtagcgaatatgacccgatttattgacgcgctgtgggcgatgaatatgaccaagggcgatatagtcaaatggaggaaatagggttgcgttaaaggcttctaatgtgccgatataaatttcacgtaccgaatcgctaacactggcgccaatcgttgtcagatgccctgtggcaatgatagggatgttaacattgagttgttttcgtaagtcgagcgcggcttgatattggcgttgataataatctgcgatcgcttcttttaaagcgccctgtttgtctgctcccgattgcccacttttgctatttatcatatctctagggcgtaaataggggattgcacaaagtaatgctccaggtgtgtgatttttttgataaagaataataggggcttgtggggtttcagtgtgaacattagcaatgacggtggtatttaaacacgctaacagtgatttagattcatttagcgttgccacagaatcatgattaccccctaaaataatcagttggcactgagtatctcttattgcgacgacaaatcgattataaagctctcgggcataactggggggggagccagtatcaaagatatcccctgcaacaataactgcatcaacttgttgttcacggatttgcgctaatagccaatcgagaaattgttggtgctcttgggcgcgagtttttgtaaaaaaatattgtcctaaatgccaatctgaggtgtgaataatccgcattgctatcccttaatgttaactgccgtcagtatagcgcaccttacttttttagtgaaaatccacctatgagctacgtattttgagtgaaatcacaccaattttagccttatttaccttaacaatgacactgtattccagtattgtcatagtcagtcataaatctgtcataaaagtgcctcataatcattatgaccctctatataaataacacaggatagagtatggcaaggcgtattcttgttgttgaagatgaaaccgcaattcgagagatgatctgttttgtattagagcaaaatggttttcagcctattgaagctgaggactatgatactgcattgagttttctgattgacccttaccctgatctggttttattagattggatgatccccggaggctcgggtatccaagtgattaaacagatgaagcgtgaaaataatacccgtgatattcctattattatgctaacagcaaaaggggaagaagaagataaagtcaaaggtctcgaaacaggcgcagatgactatgtgattaaacctttttcgcctaaagagctggtggctcgggtaaaggctattttacgacgattgtcaccgatgtcggcagaagatgtgattgaatttaatggattaagtcttgatcctgtttcacatcgagttaccagtcaagataaacccattgatatggggcctaccgaatttaaacttctccacttttttatgacccatcccgaacgtgtatatagccgagagcagttgctaaactatgtttggggcaccaatgtttatgtcgaagatcgtactgtcgatgtacatattcgtcgattgcgtaaagctatagagcaagatggccatgaccgaatgatacaaacggtacgaggaacgggatatcgtttctctgctcgattttgagttgataagggagtaattaactggtgttagaacgactctcatggaaagccctcgtgtgggggctatttctattttgtttacctgcctttgtattatcactatttatcggccaccttccttggttgctcgtggtctcattactgagtgccttgatatggcacgcctataatttaatgaaattatctaaatggttatggctcgatagatcagtattacccccagaagggaaagggggctgggagcctattttttatggtatacgacaaacacagcaacgtaaccgtaaacgccgtcgagaattaggtgatttaattaagcgttttcgtagcggggcggagagcctaccagatgccgttgtgatgatcactaatgaaggaaatatcttttggtgtaatagtcttgctcagcatcttctaggctttcgttggcctgatgataatggacaaaatatttttaatttattgcgctatcccgattttttacattatttcaccgtcgccgattttagccgccctttaactattgcattaaataatggtgctattgttgaatttcgggtgatgccttatgcggatgatcaacgtttaatggttgctcgcgatgtgaccgagaagaataagttagaaaattcgcgacgtgatttttttgctaatgtgagccatgaattaagaacacctttaacggttattcaaggctatcttgagatgatggaagagaataccgcagaaaacccggctgaacataaagtgattaagaccatgcaagagcaagcaaagcgtatggacttattagtacaacaactgttacagctttcacgtattgaatctgcgcctcatattgatttgaacacggttgtcgatatgcctgcgctattaagcgtgcttgagcatgacgcgcactcattaagccaagaacaacaaaatatcatctttgatattgaccataaatgggctgttcgtggtaatgaagagcaattgcgtagtgccgtatctaaccttgtctataacgccataaatcatacccctgagggtacgactattcgcgtgagttggaaaaaagtaccacaaggtatgttgtttagtgtgtcagataatgggccgggtatcagtgctgaacatttaacgcgcttaaccgaacgtttttatcgtgtagataaagcgcgctcccgccacacaggtggtacagggcttggattggcgattgtcaaaaagtccttacaacatcatcactcaatactgaatattgaaagtaaagtcggtgtaggaagcactttttcttttatcatgccgcaaacattgttaacagaaaaaaaataatttcgtttttatccttattttattagtacctttattacctatttttaaaagaggtgataaaggtatttttgtcatatacccatcaaatcaatatcaataaaatctaatatcgtagcgttaaattttaatattattaattaatgggaactttaattgatggctagattgctgtttggtgagtaaaaaatatacaaatcatatcggggataattggcgatatataacagttatcactggcctgaaaaaatactttagatgattattctgctttttagatcagctattgccttttttcattataaaagttttacttgtgagcagttatcggcgcttttttctatttaatatgtaattgctctgtgtaaaatggttattcttaaatattattctgaataacccatcatgaagcaaaatagatactgctgatatttttgttgtatttactttatatagtaaatgtaaattaaccatctaataacgatatattaacaaatcttatggcacatcgattaacttccagagacattctggcattaggttttatgacttttgctctatttgttggagcagggaatattatttttcccccgatggtggggttgcaatcaggggagtttgtttggactgcggccattggttttttgctaaccggagttggcttacctgtgctaacagtggtggcattagcgaaagtgggagggggaattgaagcattaagcacccccattggtaaatctatgggacttttattagcaatagtcgcttatcttgctgtcggccctttatttgccaccccgcgaaccgcaacggtctcttttaaagttggcattgcccctttagtgggtgatagtgatattgccttacttatttatagtgttatttactttttaattgttatcggtatttcactgtatccgggaaaattacttgatagtgttggtcacattctggcaccgattaaaattttagccttagctgtattaggtttagctgcgctattttggccagcaggaacgccgatccccgctacacaagcgtatcaagatatggcatttacccaaggttttattaatggctatcttaccatggatacgttaggcgcgatggtctttggtattgttattgtcaatgcggcccgctcaagagggattgataattcgtctttattaacacgttatactatgtgggcgggaattatcgcgggggtgttattaacggcgatttatcttagtttatttaagcttggttctgctagcggcagcattattccagaagcaaaagatggcgcagatattttacatgcttatgtgcaacatactttcggtaattttggtagtttctttttagctctgcttattttcttagcttgtatggtgacagcggtaggtttaacttgtgcttgtgcggagttttttagccgctatttgcctatttcttatcgtacattagtattgattttggctgtattttccgcggtagtctctaatcttggtttaagtaaactgattgcgttctctattcctgttctggtgatgatttatcctccttgtattgtgattattctgatgagtttcactttacgtttttggcataatccaagccgtattattgcccctgcaatggcaataagcttattttttggcatttttgatgccattaaagcgtccgatcatttaaaacatttattaccggattgggcggctaaattaccattaagtgagcaaggattagcgtggttaattcctgtattagtgactattgttatatgcgctatttacgataaagtagctggctcacaacataaaaaagtgatccactctgggataaacaaataagctaaaatacattaaattaaaatctaaaagggaaacggaagtttcccttttttacgaaattaaagtaagtgttgattttcttttaggcgattagtaagcgttttatcaatatcagcacgaacggaatttgaaacgtcatactctttagctaacgatgagaattgactaataatatcaacagtatgatggatatacgtttgtgcttgttgccaactttcaaaaccagctatttctgcaagatgtttgattatgtttaatggtggttgttttccatatccaccgaatgatgtgatatgttcattccttggattgggattataagtgacatcataaaaaggtgcaggctcccaatgtccatcgtcatactgtagaaaagaccaatttttactatgatcatcttgattagaagcgaataaattaaaaatagctcgcctaaactgaagctgcccggctgaaattgatttacataatacacgatttactttgatcaaatcttcgtaatctaatgaaggtaatctaaagtcagcatctaataagccacatgcactgtgcatgattaaacagcctgatttacccgaactatttgtgacacgatcaaaacgttttagggctaaccaagatttgccgtgactgcttttaggtacatcaataagtttccattgtggaggattaagatctaatttgcttgctagagtgagatagattgcttcacataaaccttcatcatgaccaagaggtaagttctgggacgtaaatttgatcaaccatgattcatcgccttgttcttcatatgttttgcattggttaaaatcgccctgtttaaaatagagcaatgctttaggtctcgcgcctccggagctaccaacaatagcaagttcagataaaacagtttctgtttgcccatcaaataccgcttgagcatctaagcctaaattaatcaaatcaacatcaaaatgttcatttgtttgatagtcagagaggggtaagtaagacaatccactcatacctttattaccaacaaaagctaatctgtccattgttgtaatttcatgtggttgtataccgtgttggcgaaaaattctatcttgtaataatcgaccccatccatcaggtagactatcagagaaaagcccatgcaagttaccatgaggttttttaggtgcaatttgtaaatctgtattatttttcagattaaaaggagaactattgccaaattgtgttaaatagtgagcatcgtattgaaaaaatacaccattatgattttgagctaatgttcccatcaaaacttgaacacctgtagacaacgtccgggttacatttaatttttttattggcttaaaattcatcttgtaatacctcttcaatggttcttggtatacgaggcttattggcttttttagggtcaacaacggcataaaggttatttaaatcatcaagacactgccaaagtaacagtagttgtcgtaatgaaattttgccttgtaactcaaattttttaattgttgatgcagggacggtactgcgctcggcaagatgttcccgagaccatttttctttttctcgtcgttttcgtaaatgagtagcaaaagctcgactaacatcaatatcggtaagtaatgagagtttcattattagctctaaacataaaatggatactataatgtccaattatagcatgatatggcataattggatattatagtgtccatttttacaagctaacttctgtgaggatttttactaattataagcattcagtaaaattattcattgcaacggggtgttgtttttcatctaaatagtagtaagtactcaccacaatattatcttcacctacaaaagttatattaaacttagttttaacttaatagcacaaagtggaaaaataaattttatcccgcttaattcgatgtgtacctttgtagggaaaactggaacttaatctataacaatgagtatacaactaccagaacaccataagcgtaaacaggtcattccgtaccttccttatcaattttacgcatggtgttttttctcctgatcaagctttgccagaatctgttcgacctgttgctcaaaatcagcaggaagtgggtttttaccaaaagataaaaagggcttacgggcttggtaatcaaccgatgaaacggcatctcgaccttgttgcatataggcattaaggaaagtgataaaacggtggttttcactgtcagtactggttaggaaactggagtaatgggatacattggggcgatagaggatcgtttttaattggcctgttttttcattaatgccatatagtttaattgccaacatattgcccgcataaccaaattgcgcctctttatagcgggttaaacgtacttttcccatgccatagctatacagtattcctctttgcctatcagcaataaggtatacaggaggcgtaaagaaagagagatagccaaatagccataaaaaaccggggaaaaaaattagccagccaatgacgaggtatttatcatattggctatcaataaaaaattcaccggagttatacgcttttatatactcccaccagctaattttttctgtttcccaaaaaggttgatattttaaaatagatttacgctcaatctcatttaatgcgttaatatctttattattttcaaataaatattgagacatgctttctagctcagctttggctccaatatgcccttccataaaattaaataatgtataacaagccataactaaaagaacgataaaaaagggtattgtattggtgagttggctattgcgctgtggtgagttaatcacacaacgctgttgattaactgcctttaaaaataccagtttttgaggtgctaaaggatcatcatagtgatgactttccgcaactaatggtgtggtttctaattgctctgggtgctttgatacagtgcgtaaattggtcattctgtaccttccttatcaattttacgcatggtttttttctcctgatcaagctttgccagaatctgttcgacctgttgctcaaaatcagctggaggtgggtttttgccaaaagataaaaagggcttacgggcgtggtaatcaacaggcgaaactgcatctcgaccttgttgcatataggcattaaggaaagtgataaaacggtggttttcactgtcggtactggttagaaaactggagtagtgggacacattggggcgatagaggatcgtttttaattggcctgttttttcattaatggcatatagtttaattgccaacatgttgcccgcataaccaaattgcgcctctttatagcgggttaaacgcacttttcccatgccatagctatacagtattcctctttgcctatccgcaataagatatacaggaggcgtaaagaaagagagatagccaaatagccataaaaaaccggggaaaaaaattagccagccaattattaaaaatatttctgcttggctattacggctaagctcaccggtataatatgccttaatatagacccatatacttattttccctttgttaaagtatggaacatatttatctaaatattttggagggcttttgccttgttcattatatgagtcataaattcttttgttataattaattgtatcctgaaatgtatacattttagatgagtgcctatccataaaaccccaaaatgtataacaggccataactaaaagtacgataaaaaagggtattgtattagtaagttggctattgcgctgtggtgagttaatcacacaacgctgttgattaactgcctctaaaaacactagtttttgaggtgctaaaggatcatcgtagtgatgactttccgcaattaatggtgtggtttctaattgctctgggtgttttgatacagtgcgtaaattggtcattctgtaccttccttatcaattttacgcatggtttttttctcctgatcaagctttgccagaatctgttcgacctgttgctcaaaatcagctggaggtgggtttttgccaaaagataaaaagggcttacgggcgtggtaatcaacaggcgaaacggcatctcgaccttgttgcatataggcattaaggaaagtgataaaacggtggttttcactgtcagtactggttaggaaactggagtaatgggatacattgaggcgatagaggatcgtttttaattggcctgttttttcattaatgctatatagtttaattgccaacatattgcccgcataaccaaattgcgcctctttatagcggattaaacgcactttccccatgccatagctatacagtattcctctttgcctatcagcaataagatatacaggaggcgtaaagaaagagagatagccaaatagctataaaaaaccggggaaaaaaattagccagccgataatcatcaatatcttaaacttatcatttctgtaaattttatccgtatagtaatcgattaaatatgttccgatacttatttccttaactttcatatatggcaaatagtttgataaccctattggtaagttatcaacaccatatttttcattaaaatagttagagttatcttgaagggtaaaataatttgatttatggttttcaataaaaccatacagtgtataaacggccataactaacagtatgataaaaaaaggtattgtattagtaagttggctattgcgctgtggtgagttaatcacacaactctgttgattaactgcctctaaaaacaccagtttttgaggctccaaagggtcatcatagtgatgactttccgcaattaatggtgtggtttctaattgctctgggtgttttgatactgtgcgtaaattggtcattccgtgccttccttatcaattttacgcatgttttttttctcctgatcaagctttgccagaatctgtttgacctgttgctcaaaatcagcaggaagtgggtttttaccaaaagataaaaagggcttacgggcttggtaatcaacaggcgaaacagcatctcggccttgttgcatataggcattaagaaaagtgataaaacggtggttttcactgtcggtactggttaggaaactggagtagtgggacacattggggcgatagaggatcgtttttaattggcctgttttttcattaatgccatatagtttaattgccaacatattgcccgcataaccaaattgcgcctctttatagcgggttaaacgtacttttcccatgccatagctatacagtattcctctttgcctatcagcaataaggtacacaggaggcgtaaagaaagagagatagccaaatagccataaaaaaccggggaaaaaaattagccagccgataatcatcaatatcttaaatttatcatttttgtaaattttatccgtatagtaatcgattaaatatgttccgatacttatttccttaactttcatatatggcaaatatcgagataattcttttggtaagttatcgataccatatttttcattataatagttagacctatattgaagggtaaaataatttgatttatggttttcaataaaaccaaacagtgtataaaaagccataactaaaagtacgataaaaaaaggtattgtattagtgagttggctattgcgctgtggtgagttaatcacacaacgctgttgattgaccgcctctaaaaataccagtttttgaggtgctaaaggatcatcgtagtgatgactttccgcaactaatggtgtggtttctaattgctctgggtgttttgatactgtgcgtaaattggtcattctgtaccttccttatcaattttacgcatggtttttttctcctgatcaagctttgccagaatctgtttgacctgttgctcaaaatcagcaggaagtgggtttttaccaaaagataaaaagggcttacgggcttggtaatcaacaggcgaaacggcatctcggccttgttgcatataggcattaaggaaagtgataaaacggtggttttcactgtcagtactggttaggaaactggagtagtgggacacattggggcgatagaggatcgtttttaattggcctgttttttcattaatgccatatagtttaattgccaacatgttgcccgcataaccaaattgcgcctctttatagcgggttaaacgcactttccccatgccatagctatacagtattcctctttgcctatcagcaataaggtacacaggaggtgtaaagaaagagagatagccaaatagccataaaaaaccggggaaaaaaattagccagcctaggataagatatttgtcatattggccatctataacaaaattacctgaatcataagcctttatatactcccataaactaattttatcttttccaaaataaggtttatacaattcaattaattttgctgatagcatattttgttcttttttatggccatatttttcctctacatgtttggccattatttcaatggaatttttagtagcaatatgattatcaacaaatccgaacaacgtataaaaggccataactaaaagtacgataaaaaaaggtattgtattagtgagttggctattgcgctgtggtgagttaatcacacaacgctgttgattaactgcctctaaaaatattagtttttgaggtgctaaagggtcatcatagtgatgactttccgcaattaatggtgtggtttctaattgctccgggtgttttgatactgtgcgtaaacgggtcattctgtaccttccttatcaattttacgcatggtgttttttctcctgatcaagctttgccagaatctgttcgacctgttgctcaaaatcagcaggaagtggatttttgccaaaagataaaaagggcttacgggcttggtaatcaacaggcgaaacggcatctcgaccttgttgcatataggcattaaggaaagtgataaaacggtggttttcactgtcggtactggttaggaaactggagtagtgggacacattggggcgatagaggatcgtttttaattggcctgttttttcattaatgctatatagtttaattgccaacatattgcccgcataaccaaattgcgcctctttatagcgggttaaacgcactttccccatgccatagctatacagtattcctctttgcctatcagcagtaaggtacacaggaggcgtaaagaaagagagatagccaaatagccataaaaaaccggggaaaaaaattagccagccaatgacgaggtacttttcatattggccatcagtaaaaaattcacctgaattataagcctttatataatcccaataatttatattttttttcccaaaatatggtctgtacgtgtttacatattttaatgtaggcgcatctaaattaagttcattactatatttagcctcaactttttcgaccatactctgaaaatgtcttttataatttatatgttcggaaataaaaccaaataatgtataaaaggccataactaaaagtacgataaaaaaaggtattgtattagtgagttggctattgcgctgtggtgaattaatcacacaacgctgttgattaacagcctctaaaaataccagtttttgaggtgctaaaggatcatcgtagtgatgactttccgcaattaatggtgtggtttctaattgttcagggtgttttgatactgtgcgtaaactggtcattccgtaccttccttatcaattttacgcatgccgttttttctcctgatcaagctttgccagaatctgttcgacctgttgctcaaaatcagcaggaagtgggtttttaccaaaagataaaaagggcttacgggcttggtaatcaacaggcgaaacagcatctcggccttgttgcatataggcattaagaaaagtaataaagcggtgatcttcagtatcactacttaataaaaaacctgtgtagtgagagacattgggacgatatatatgtattcctagctcaccagtttcaggatgtatatagaataatttaaatgctaacattttaccggcataaccgaattgagtatcttcataacgggttgccatcacaatgccatctacataagaatataagatctgtcgttttctatcagccaccaaataggtcattggcacaaagaaagcaagggagcttaagatatataatccactgggaaataaaactaaccatgcgaggacaaaatatttgtcatcttcactacctacaaaaaatttacctgaattatatgctttgatatattcccaccaacttatcttttcctttccaaagaaaggtttatatttatttatatccctaagtacaacgcgatcgttccctgtataataggtactataattttcaatttctttaatattatcttctaaagtatattttgtaataatatgtccttcaataaaattaaatagggtataaaacatcattactattaataccaaaaacatcgggacagtattcgtgaatcgaccattgacttgtgatgatttaatcttacattcttggttgttgatactttgtaaaaatacgagatcttttggcggtaaagggtcatcatagtgatggctttcatctattaaaggggaggtctctagttgttcaggaaagttagatatcgtaaatggattactcattattccatatcctcatcatgaatacagccatatattttatcgtcggggttgccgtttcggtaacgtagtggtgctattttccttttaagatgatctgctcagtaggtgataaatcaaagctccataaagtaagctaagaaaatttaagttgcccaaatcactttggtctgaattcgtcttgaaagcagtttaaactatctaaatattgtgcgacgaggcagagaaagataatatttgctttttttatccgctctgcatagatatcattttttgcataatctataaattcactaatattatgtgttaggttgagagttttataatactcgattgtacgtgaaattgtccacaatagagtattaaagttctctatgtaacacataaatattgactaggttgacctatagattgaaagtacacataatttttctttaatacagtgaaaaatgtttattgcttaatcttatgctgtgctaatattgttttattgaccattttagttcacaagaaaaatatatgactgttgttttaactaatgcatcaatttttaattatgcccaggtgaatgccagcacaataaatcaaagtgattccttaccgagtgaaataattatattataatagcaactattaatataaaaattcggagtccaaaataatggcttttaaatataaaataacaataatcatatttttgctatcttttattttttttgtagtgtatgagttttttattcccgttaaagttatgggagtacataaagatacgtataccacctctattctggttgagaattttccgataactgattatggaaaaataatatggtggaaaaacaatcaagatgttttagataaaaagtatgatttatttaaggataaaaatagtttatttttgatttctatatggaattacggtgatggatatttagaagaaggaaaatacgatcgattatgttttactgaaattaaaagtaacaaaaaatgtatagaaaaagataaagtgatgtcaataatgtattctttaaatgaagaggaaattaggatcggtaattctgcatatattaaagataaaaatggttcttttataaagaaagacaaggatgctaatacaactatcacagtagtccctaatgcataacttggtcacaagtggtgataatagcttattcacattttatgcttaaaaatatattttgctgtttatattaaaaatataacgctaaatctttgtgaaacaatgcgaagttatcgtgtttcgtctccatgtttgcccaatagcttctatgagaattttttattaattattgagttaagtaatattatccattgcaactgggcgctgtttttcatctaagtagtagtgaatgccggcctcaatattatcttcaccttcatagaaaacgttaaagcgggtacgttttccatcgtgataggcaatcacagcactaccgccttttcctaagcaaaattgctgaagatgccctgttgagatacacacgctgttatccccagatacagagagtgtgcagttatcacctgtgttgatagcaatggcgttatcgccagtaacagtaatatgtgctaaatcaccagtattggttatttttgtacgggattgagtcgcattaataaagtttcttatgccactattggcaatatgcgccccttgaccagaagcgtaaattttaacatcgttgccactattacaaatacgagagcgtcctcctaagctaccaatacgacattgatctgccgtattactgatctttccagcaaatccgctgttgattaattggttactataaccagtgttagcaatactgttttcatcaccggataaggcgacaatattatcacgaccacataatgcaagggcggtgttaaattgttggcttttgacaatcagttgatgccattcggtggaaaactggatgttttcgtcgctagattgcggttggtgatagggtaaacgttgtaatgtcacaccggtttgtttttcattgcctaacagggacaagatgttttctatcacttcttgttcctgtttggcaaaagaggactgactaaaatgacgcagataaatatattgaattaagctttctatccattgtgtttgacgttgttttatcaattcattatggatagcacggtaagtacctccatggggaaaataacgcaaaaaccaacgataaagtgaacttgaaacatgcagttggcgtaagtcttctttggttagtgtgatattttcctgtgaagggactgacatataagctccttgatccatctatttattagtgtctatggtagccgtcaaccatactgcgaaaggtttggaatggcgttcttccggtggtacacaggtaaaggtgaccaaagataaaaaagacactacacacggctagtatttggtgaattattaataaccaagctttaaatagcacagcatcagcagggataaacatgggattttgcagtaagatccccgtgattaaaagtaatggtactaatgcatacatcacacctaaataagccatttgttgcagtggattaaatttaaccttgggagtggctggaaaaggatgatcttcccccttaataatgccgtaaagataaaaacgtgtttgcattaatactcgttgcaaccagtttttactgtcaatacggtaaaatttaccattgccactaacaagattaattaatacaaaggacaaccagcatactaagagtagataaccacaaatttcatgcacattgacgagtaacgccgtgtcatgtgccgagagtagggcgaaatggttaatcccgccactgagaaggagtaagataaataaagttgcattactccaatgccataaacgtaccgcttttgagtaaagatagagtttctcttcttgatgatgctctccatggggtgtggcaaagcggtaacgtaaaaaaccatgaagtgcgagtacaagtagcatgccgacaaataatacgccggcaacaattaaccaaagtggtaaatagtccggtgtatagattaagacatactgtttgagtgaggcttgaaattgtgctgcatttggcatgatatttattgcactcatacgttatctcccccttgtacatgaggtccaacacgtcgataaagatgcggttttcctactccatcaagttgatagagatagtagtcatgtgtttttagccattgctgaatttgtgggctatcttctctaccaaagagtagggcgttttgtgggcaagcgctgacacaaatcggtgggaaccctttttgtaatcgagactcaagacaaaagtcacatttatcagcaacatgtgttacgggattaagataacgaacttggtaaggacaggctgatatgcaataactacagccaatacatttctctttattaacgcgaacaataccattgctttcatcgcgccaagatgcgcccgtaggacaaaccgagatacaaggagcatcttcacattgctgacatgagtgtctaaaaaaatggtacttatcgttatcttcttttaagcttaatggaatgtgtgcaatatccattcgcgccattccggttggtactttatttaatcgacggcacgctgtggcacaaatattacagccattacagcgtgtttcgtcatggatcatggcatagcgtatcggttttttatctgtggctgccgctaaggcactccccagtggcgcactgaaaaagatcacagaacctatacctgctacaaatttacggcgagaaacacgcattatttttgctcctcaatctgatgctgttgtaatacccacagaacatttcgtcgacagggtagagcactaaggattttcatattgttctacctccagccattctgttaatcctctcgccttgccataactcattagggtgctactaaataggtaaggggcattgttagaggcgaatatttgctgaatatcttgaaaatcagggtgagttttcatcagcgtcaatgcatcgtctatttctgcagcggtgtaataaaaaggctccaacatcaacatgctttgcttcaatggtcgagggtaggtttcgcattcaaagcgaactaaacctgcaatggcagtacaaatatcggtatatctattgagaagctgtaattgtgcatagttatctgacataacagtgtcagaatagaaataatcctcaccattatgtgttaaataagtaatatcaacgaaagtgtcctctttcaacgcgactcttaattgcattacctcttcttcagagagtgaataaggcgcatcatacagcgtggaaatagctaatagttcaccttcttttgaacattgacggattgcattggctaggtgttgttcagccgataattgcgcgatatcttcaatttgctcttctgtggtatccgttaaggtgtgagtaccatgcccaatacctctctctgataacggcaatagccaacgacgaagagaaatatccggttgttctaaagtaatatcagcatcatgagcaatatcaggtggtatagaggctgatgcattctgtttattcatcatgatctcctttacctattaattgggtaataagccacgtgatgctaaatcgtcagcaacatcttgtaatccaaggcgtactaaagttgcttttgttggacagcctaattgtggatcccagcccatttcttcataaaatagggtgagagagagttgcatatcttctctatccattttgtctgtcccttccgtaaagacaggaatatcaggatctttatcaaatacccatgaacagatttggtcatgctcattacgcatatccattgtgttcattaacttaaccgtgtaagcacgatgtaaagtgaagatgcgttctgaggctaaatcaagatcttgagaagtggttggttcaccggtaatggcagtgaaaaattttgcttccatatctaaatcgccacgatagttgcggcttttatgaggtgatacggtcattggccatacccagttacataatgtcacggcatcatgtaggcaactacgcaaaatggtccatttggtataggcgatttttgctttattaatcggcgtgtagtttttggtttcatcaaaagcatcaccagagccaaatagttcacctgcaatctctttttgtaattttagcggtaaaccactaccgatatagttgatatgagtatgtgtcatcgcatcgcggttaaacatacagttgacgatggagcctacttgagcagaagcttcatttgcatggtgaatagggaaacccatcggtgaccaaagtttatttttcttattaccccaatattcctcacctaaattccagcgttgtgcaattaaataagagccatcagcaaggtgactaaattcacctttacgatgggctaagcggtaatagaaatctttgataaatgcgggatcaccttcttcaagtttatcccaaggaatatcgttatactcttcttcagaaagaacgcgtttaaaaacgccgtgggtatagcaataagtaaagtcacgatgaagctgaccgtagttgcaccataagcccatatcatcaaaaatattgaggccgacaagattaccaacaacattggcatcgccttttttctcaatatctttcgggccattagggaaaatggtggtatgaacaaagttggcgacacaagtgtttccgcctgtttgaggtacgccaaatttttttgcttgcgggacattaagttgtgacatacagcgaatagggcatgagtggcatccccccatttttaccgtgtattgttctgcttctgggccaagatcgaaggttgatttcatggttctaaagccgacagtattggcattgcccggtgggatctcccctgtttcaatggggccaccttcagccgctccccaataaagccctttacgtgcagtccagcgtgaacccggatgtgaatactctgcccaagattgcggggtacttggtacaacgtgattattatttgcgccaatgagttgtgtcatcatatagtcgttaagctcttttaacgctttacgatcggcaacattaacgccacggcttccttcaaccacaatcgcttttaattttttagcaccaagtacggcaccaattccagcaccaccactgtggttacgactattgataagtcctgaaagagggacaaggttttcacctgcagggccaatagcagcaacacacgcttcagggcttgtttgagcacaaagttcttctgttgtttgacgagttccttttccccataaaaaagaggcatcttcaatggaaacttggtcatcatcaatatggatccacacggggttatctgcctgaccttcaatgatcaacgcatcatagccggcaaatttcatccatgcggcaaaaaagcctcccatatgggcatcaaccactaaattaccgcgagtaaaggttgaaagagaggtgatattgacgcgagagctacagggtgcgcctgatcctgttagcgggcctaccgcaaataccactttgttttcttcatcaaaaggttttacaccgggtgcaacttcttcatacataattttgtagccaaagcccataccaccaattaaggatttgtattggcttgagctttcgcgagagatggcaccggtagttaaattaattcttagtatattgccagtccagccgttaatcataatattgcttcctaatctaaagaggggtcaatgaggtgattgctaagaaaaatcaaacggtaatttctttccattcaataatgtgcaatgcccctgttgggcatgctgaagcgcattcaccacataaattacatttaccggattttttcgtttgtggattgacggttgccatcatccacgggcaagctgttgtacaagcggcacagccgatacaacgacgagtatcaacgacaatacagccaaactcttcttgataacggatagcttttactgggcagacgttcatacactcgggtgttttgcattggcgacaagtatcagtggtaaagtttaagtcgccatataagccccctccagagccaatgcctttatcaccaaaatagaaatgacgatggattttagtacgggagaagaaagatccaacgctaccatcattccatgttgtacatgctgtttcacaacgatgacagccagtgcaacgggcacgattagtcactaatacacctttaggtgtggttgtcagttgaataacgccactgtctatttcttcttgcttacaacctaaaagagaaagtagtgcgggtgctatggtgatccctgccagccctttaccggatattcgcagaaactctagtcttgatagtccaatatctaatataggacgatgatgtgtatcagacattaatatttatctccgcttaactaatttaaataagaaataatttgtgatgataaatgtgttcttttctctacttgtttttcgttgtatataaaatataataacgattggtttagaatagatataatagttatcaacactttttattactgaaaatagcttgtggtgaattgttaaatatttgtatttacaatatgttacattcggtttttacgtatttttcattaaccattatgatattgtggttattgaaaaatttattctgtgactgcaatcatagaaataaaattaattatcgttagttaaaaaattaaattaagtgattattgttcttatctgtaattacgaaggataattaatattgtttatatatattctattatttaaatagaatataaagacatttgttcttatattacgtttgaaattattattttaatggtaaattgatatttaatattaattatttatttaatgaaaaatgaatcttgattattattaataaaaaaagatattaataaattgtaaaacagtgacgagatcatttttataaaaaaagaaaccttgtctaataaagagaaggtttcttttgccaatggtattatatgactttatggttagtagcccacggctttacctgctggacgtcgaacatcatttgaaccataaagataaccttcgcgtatcgcccctgaaacagcagaatcattacctgacgaagcagggatcactccttgttctcctggaaggccgaccataatcaattcagccgcgccccatggcgtttgttcgaccattttatatcccatggcagaaagtttttctaaggtatcttttgataatcctcgttgttcataataaacctcatcaggtagccattgatgatgaattcgagggctattgacggcttcttggggggacataccaaactcaataatattaagtgccgtttgtaaggtgattgagataatacgagagcctcccggtgagcctaatacaagaaagggtttgccatctttagtcacaatggttggactcattgaggatagtggacgttttaatggggcaatactatttcgttcaccttgtactaagccataaagatttttctcgccaactttagttgtaaaatcatccatctcattattgaggaaaaagccagtccccggggcgataacgacagcaccaaaacgaccattgatggtgtaagtggttgaaacggcattaccatctttatcaatcaccgaataatgtgtggtttcagggctttcatgaggtgcaataccgggttgtactttttctgatggggtggctttattcggtgtaatttgttggcgaagctctgcggcgtaggctttacttaataacttttctgttggattgtttataaattgcggatcgccaagaaaggtgtttctatccatataagcatgacgcatagcttctgtgagcgtgtgaacatattcggcagagttaaaacccatcgatttcagatcgtagccttctaaaatattcagtgtttggcaaatagtgacgccccctgaactgggaggaggagcagagataaattcataacctcgataagtacaggtaatgggaggtgtttcggtaatagtgaagttcgcaaaatcttctttggttaataacccattatgctgttttgaagcttgttctacttttttagggatttccccttgatagaaagcatcagcaccttggttggcgataagttcaagtgtattggctaagtctgtttgaatgaggcgatcgccaggctgccatggtgttccatcaggctttaagaaaatttttgctgattcaggatcttgtttaaatcgctctgtggtggtgtctaatacgtcagtatcagcacgggttaaaatatagccttctctggctagtttaatagcgggagccatcacttcttggcgtgaaagagtgccatatttttctaatgctgcatcaagtcctttcactgtacccggcacccctgaggcaagatagccgtataggcttgcctctttaatcaagttaccgtctttatctaaatacatatttttagacgctgccgtaggcgccgtttctcgaaaattaataaaggtattggtgccatcagcaaggtgtatggtcataaagccaccaccgccaatatttccacaacaagcatttaccacagcttgtgcatagccaacagcaacagctgcatcaatggcattccctcctttttgtaaaatatctttccctacttgtgaggctaaatgttgtgaagagaccaccataccttgttgtgcttcaaccgctggctcataggcggcatagagtgcaggtgaaaaaagtgtggtaagtaacagcaggtgcgttttttttatagtaatcatgattatatccattaataacagtgggttagtttcaatagagataagtgaaagtaggtgtgtatacgctagtattaatgtggttaacaattacgtaacaataagtatagagagaagttattaatgacgagaattttttttgaagagatgatcacaaaatcatctttaagcgaataaataataatgttatgtacaaatagtaatcttaataaattgagttgaaaggcaaaagaatagatggagtattaataaaaaagcctgttttcacaggcttttagcaaatatttgtttagcttactggaatattacagtttgcctgagttcgctttcagatatttagcaacaccgtctggagatgcgcccataccttcttggcctttttcccattgtgcagggcaaacatcaccgtgctcttcgtggaattgtagtgcatcaaccatacggatcatttcgtcaatattacggcctaatggcaggtcgtttaccacttggtgacgaacgacaccttctttgtcgattaggaatgaaccacgtagtgcaacacccgcttctggatgttcgataccgtatgctttaatgatatcgtgtttgatatcagcaaccattgggtatcttacttcaccaataccgccatcatcgatagctgttttacgccatgcgttatgtacgaattctgagtccatagaaacgccgatgatttcaacaccacgtttttggaactcttcaaaacggtgatcaaatgcaatcagttctgaagggcaaacaaaagtgaagtccattggccagaagaaaataaccgcaggtttgcctttgataaatgaatgcaggttaaaatcattaacaatttcaccgttacctaaaacagcagctgctgtgaaatctggggctttgcgagtaaccagaaccataatgtactcctgtaaattgaaagagtttatactcgtcatatttcaagttgtcgcgttgttgactgcgttcactcgaactatttagagtaaatttaggggataccctgtttttaaatttagggtgatgccctgtttttaaatgatgtatacagcataaataatcaatcgttattgataaaatcatacagaacaatctatttgataggttataacgatgaactttatacaacaaaaatgacttatttatgactccttgtataactatctattctaatcaactttataaatgaatactacgcttgttaacggatcgttaccaataaaaagataaattgacgtagtctctgtttgctcgattcaatgtaatgcttaaccatgacaaacagatgaataaaaagagccttaatgtatcagtcatccagctgatgatgttgtgctctttctaacaattgtggataaaattgccaaaaaatctcacttaactctttataatgcgtttctagtgcaatataagagcctgcaagcgcacttaaacgcggtcttctttttgccatgccttttaacgtctgtgctatataagttttatcagcataacgagtcaaccacgcttggggccataaatattcattgagctcttgaaatttttccggagttcgccataaatccggttcaatggtattgcgcacataagtaacaaattccaagagcggtatgtcaggttcaaatttatcccaatgtagtgagagaaaatgatcccaaaatatatccaaagtaatgggtgcaacgcggcggtattcattcggaaaaagttgtcgagcttgtttaactaatggatgagtatcagtcagcacatcaatacgcctatgcatgcgaatgccgtcaattaccgcttggctgtaatcgttactcggcgtaccttttacatagtccgccatcatattgcctaataaggagcttttcgctctaaaggcgaggtgtaagtgagcaagatagttcattgtactatcatagcgctttttaaataaaaaagtgcttctttgttgcactgattaacatgcagcactagactagtgcgcctgttttttatgaaagtagtcgtttaattatgcgtgtatccgattttagatttgacctgcctgagtccttaattgctcactatcctcacccccaacgtagtgggtgccgattattatccctagaggggaaaacgggcaatttatctcacggtgtctttacggatgtattagataaactcaatgccggtgatttacttgtatttaataatactagagtgatccccgcgcgtatttatggtcgtaaagcctccggtggcaagatagaagtattagtggagcgtatgctagatgaacatcgtgtgttagcccatgttcgtgcatcaaaatcacccaaagagggcgcatcactgattttaggggaagacgaaagtgtacaagcaaccatgattgcacgccatgatacactatttgaaatccgttttgatgatgaaagagatgtgctgactattttaaatagtatcggtcatatgcctcttcctccttatattgatcgtccagatgaaagatccgataaagagctttatcaaacggtctataatgagcgtcccggtgcagtagctgcacccacagccggattgcattttgatgagccgttattagaagcgttacgtaacaaaggcgttgagatggcctttgtcactttgcatgttggtgctggtactttccagcctgttcgtgtggataatatcgaagaacacactatgcattccgagtatgctgaagtccctcaagaggtggtagatgccgtgctcgcttgtaaggcacgaggtaatcgggtgattgccgtgggtacaacgtctgttcgctctttagagagtgcggctaaagcagccaaagatgcattaattgctcctttttttgatgatacgcaaatttttatttatccaggttaccaatatcaaattattgatgctttgataactaacttccatttgccagaatcaaccttaattatgctggtttctgcatttgctggttataaaaataccatgaatgcttataacgtagcggttgaacagaagtatcgttttttcagttatggtgatgcgatgtttattacgcgtaatcctttagctatcaatgaaaaagtgggtgaagagtagggctttattctattttttaacgttttttttcattttatgaccggttatgtcaattttgctgcttgatctctttgactaagcacagcttttgttgatgtaacatatacagccgtctaacaaatgattagaatgtgctgtttttattatgcattggactgtttttctgatgcttggaggatgagtgaaatacgaattagataaaacagatggtcatgcccgtcgtggtcgtcttaagtttgaacgcggtgtcgttgaaacacctgcatttatgcctgtagggacatacggtacagttaaagggatgacacctgaagaagttgaagccacaggtgcacaaatccttttaggcaatactttccatttatggttacgtcctggtcaagagatcatgaaattacacggtgatttgcatgactttatgcagtggaaagggccaattttaaccgattcaggtggtttccaagtctttagtttaggcgcaatgcgtaaaattaaagaagaaggtgtgcatttccgtaacccaattaatggtgaaaagattttcttaagcccagaaaaatcaatggaaattcagtacgatcttggatcagatattgtgatgatcttcgatgagtgtacgccatatccatcagattgggattatgctaaaaattccatggagatgtcattacgctgggctaaacgtagtcgtcaacgctttgatgaattaaacaacaaaaatgcattattcggtattattcaaggcggcgtttacgaagatttacgtgatatctcagtgaaagggctagtggaaatcggctttgacggttacgctgttgggggcctagctgttggtgaacctaaagaagatatgcaccgtattttagaacatgtttgtccacaaatccctgcggataaacctcgttatttaatgggtgtaggtaaacctgaagatttagttgaaggtgttcgtcgtggtatcgatatgtttgactgtgtgatgccaacacgaaatgcacgtaatggacatctgtttgtaacaaatggtgtcattaaaattcgtaatgctaaacatcgttcagatacatcaactctggatgaacattgtgattgctacacctgtaaaaattatagtcgcgcttacctacatcatcttgatcgctgtaacgaaattttaggtgcaaggctgaataccatccataacttacgctattatcagcgtctaatggctgaaattcgtcaagcaattgatgagtcacgtttcgaagatttcgtgcatgagttctacgaacgtattggtaaaccagttccaccgctaaatagcagtgcgagtaagtgcgattaatgtatacgagaaagcccaattctgtgtatgatattgggcttataacttgagtatcgtcgatatcgacaacaatgaggaaaaagtgaatgagttttttcatttctgatgctgttgcttctgctggacaagcagcacctgaagcaagctttatgtctattttaccgatgttagtgatctttattttaattttctattttatgatcctacgtcctcagcaaaaacgtactaaagaacaccgtaaactgatggaatctatcggtaaaggtgatgaagtgttaactactggtggtttaatcggccgcgttgttaaagtttcagataacggctatatcgttgttgctctgaatgaaacaactgaagtaactatcaaacgtgactttgttgccgctgtattaccaaaaggcacaatgaaagctatttaatttgatttccccaaagggaaaagggaactgccgtgctaaaccgttatcctttgtggaagtatctgatgttgatattcgctatcctcatcggtctgctttacgcacttcctaacctatatggtgaggatccggctgttcaaatcactggcgcgcggggaaccgccgccaatgagcaaacactggatcaagttcgatctttattagataaagaaaaaattgaagcgaaatcaatcgcccttgaaaatggtgcgattttggctcgtttcagtaaccctgacattcagttacgtgcccgtgaagcgttgttacctgcgttaggtgacaagttcgttgttgcacttaaccttgcaccagctacgccaaaatggttagaagccattggcggtgagccgatgaaattagggttagacttacgtggtggtgttcacttcttaatggaagttgatatggaaaccgcgttaggtaaacttcaagaacaaaatgttgatagtttacgtactttattacgtgacgaaggcattccatattcttctatccgcaaaacggataattatggtgttgaaatccgtttccgcaacgctgatgaccgttctaaagcatcagattatcttgcgcgtcgtaaccaagatctcatttttagaaatggggataataactcgttaaaagctatttttaccgacgagcgtttacgtgatgcgcgtacttatgcggtacaacaaaatatcaccatcctacgtaaccgtgtcaaccaattaggggttgctgagccattagttcaacgccaaggtgctgaccgcattgttgttgaattaccgggtattcaagatacggctcgtgcgaaagaaatcctaggtgcaacagcaacattagaattccgtttagtgaatactaatgttgatccttccgccttagaaacaggacgcatcccgggtgactcagaagtgaaatacactcgagatggtagaccaaccattctttataaacgtgttgtattgacgggtgaccatattaccgattcaacgtcacaagccgatgagtacggccagcctcaagtaagtatttcacttgatagtgctggtggctctattatgtctaactttaccaaagataacgtcggtaaaccgatggctactctttttgtagagtataaagacagcggtaaacgtgatgaaaacgatcgcgcaattttggtaaaaaatgaagaagttattaacgtggctaatattcaaacccgtttaggtaataacttccgcattactggtatctctaatgcgaatgaagcacgtcaattatctctgttattacgtgctggagcattgattgcacctattcaaatcgttgaagagagaaccattgggccaacattaggtcttcagaacataactcaaggtttagaagcttgtttatggggtctgatagcctctgttgcctttatgattatttattatcgtaaatttggtgtgatcgcgagtacggcgctattagcaaacttggtgttaattgtgggggtcatgtcattattacccggtgcaacgttaaccatgcctggtattgcgggtattgtcttaacccttgcggttgcggtcgatgctaacgtactgatcaacgagcgtattaaagaagagttacgtaatggtcgctcagtacaacaagctatccatgaaggttataaaggtgccttctccagtattattgatgcgaacttaaccacgttaattactgccgtgatcctttatgcagtcggtactggctccattaaagggtttgctatcacaactgctatcggggttgcgacatccatgtttaccgctattgtgggtacacgtgcgattgtaaacctgctgtatggcggtaaacgcatcaagaaactgtctatttaaggagcacgttgtggcacaggattatactgttgaacaattaaaccatggtcgtaaagtcattgactttatgcgttgggacaacgtcgcctttactatttcgtttctgcttttggtagcatctattgctatcatttccgtgaaaggatttaactggggattagattttactggaggaacggttattgagatcaatctcagtcaaccggccgatctagataaaatgcgtgatagcttggcagccgccggctataaagatcctctgttacaaaactttggtagcagccgcgatattatggtgcgtatgcctcctgttgaaggacaggctggtcaagaattaggtaagaaagtcatcgatattatcaatgttgaaattgataatgatgcaacagtcaaacgtattgaatttgttgggccaagtgtcgggagtgaattggctcaaacaggggcaatggcgttactttctgcacttatctgtattctgatctatgttggattccgttttgagtggcgtctagcattaggggctgttatttcacttgcccatgacgtggtgatcactttgggtattttatcactcttccaaattgaagttgatttaaccattgtggcgtcattgatgtctgttatcggttattccttgaacgatagtatcgtggtatcagatcgtattcgtgagaatttccgtaaaattcgtcgtggtacctcttatgagatcatgaacgtttcattaacacagacattaagccgtaccatcatgacatcagcaacaacattattagttgtgttgatgctctatatctttggtggttcaatgcttaaaggcttctctttagtgatgttaatcggtgtttcattcggtactgtttcatctatttatgtggcttctgcattagcactgaaaatgggcatgaaacgcgaacacctgattgttcaaaaagtggaaaaagagggtgcagatcagacaacactcttaccttaatagagcgtttttctgacataaacatcgcaaacaccctgccagttaatgactgacagggtgttttttgttcactgaacaggtacactgtttaggagttttgtcaacagtaggaataactatgcattgtccattttgcacagccgtagataccaaagtaattgattcgagacttgttggtgatggctcacaagtgcgccgtcgtcgtcaatgccttgtttgccatgagcgctttactacctttgaagtcgcagagcttgtgatgcctcgtgttgtgaaaagtgatgaaatccgtgagccttttgatgaagaaaagctacgtagaggaatgctcaaagcattagaaaaacgccctgtgagttctgatgatgttgaagctgctattaatcatatcaaatcacaattaagggcaacgggcgaaagagagataccttccaaacagatcggtaattttgttatggaacaactaaagaaactggataaagttgcttatatccgttttgcttcggtttatcgcagttttgaagatgtgcgcgattttggcgaagaaattgcaaaattacaagattaatcattcgcttcacaccttcacacgactatttgaaaataacgataaataataaatctatgatgacaattaacaacagcaacaatcttacgggcaatgagccggctaatgatgaaacctatatgcgtcgagcgatagagttagctgcattaggacgttttacaacatcacctaacccaaatgtgggatgcgtgattgtgaaagaagggaagattataggtgaaggttatcaccatcatgcaggtggtccacatgccgaagtgaatgcattaaatatggcgggtgaaaatgccaaaggtgctactgtctatgttacgcttgagccatgtagccactttggtaaaacgcctccttgtgctgatgctttaatcaacgccggggtaaaacgtgttgttgctgcaatgcaagatcccaatcctcaagtggcaggacgtggtttacataaattagtcgctgcaggtattgatgtttctcatggcgtattaatgcaagaagctgaaaaattgaatatcggcttttttaaacgtatgagaacagggtttccttatatccaattaaaactggccgcctctttagacggtaaaacggcattagcatcaggggaaagtcaatggataacctctaacgcttcgcgacaagatgtgcaaaactttcgcgcgcaagctagtgctattttaacaacgagtgccactgttttagccgatgatcctgcaatgaatgtgcgttgggaagcattatccgatgagataaaagcgatttatccactagagtcattgcgccagcctattcgcattattaccgatagccaaaatagggtaactcccgactataaaattacacaacttgcaggtgagtgcttgcttgctcggactcactctcagcaagaagcttggcaaggtgatgtctcagaaattttgcttcctactaatggcaaaaatagtagtgtcgatttagtgttattaatgatgcagttaggtaaacgcaatattaatagtgtatgggttgagagtggcgcacattttgctggcgcactattagagcttggtcttgttgatgagcttatcatttatattgctccgaaaattttaggcaatgatgctcgaggtttattatccatttcaccactgtcgtcattatctgaagctcctgaatttacaatagattctcttcaacaaatcggccctgatatccgcgtttgtttaaaacctcgttattaatagatgcaaatatgtgtgtctatggcgctatttgtagtaaaatagcgccgtgtgtgttattccctgtcgttacgacattgttatcagccaactaactaccttgatttatcaaggatttttggctcctttgctgtgttatcataaaactgagcgcagtaaaggaaagaatgtgataaaatccgcgccccgcggataggagaaaaaggtaacctatgaacgtaatcaaaggtgttgtcgcggcgccaaacgcacgtgtagcgattgcaattgcccgttttaataattttattaatgatagcttgttagaaggtgccgttgatgcacttgagcgtatcggacaagtttcctcagaaaatattaccgtcgtttgggttcctggtgcttatgagttgccattaactgtaaaagcattagtagaaagcgacaaatatgatgccgttatcgcgttaggcactgttatccgtggtggaaccgcacattttgaatacgttgctggcgaatgcagctctggcctttctcatgttgcaatgcaaagtgagatccctgtgacttttggtgtattaaccactgaaagcattgagcaggcaattgaacgagctggtactaaagcgggcaataaaggtgctgaagctgcaatgacagcacttgaaatgatcaatgtacttaaagccattaaaggctaatcatctgttttaactaaaggggaattttgtgaaacctgctgctcgtcgtcgtgctcgtgagtgtgctgtacaagctatctactcatggcaattatccggaaatgacatcgcggatgtggaattggagtttttatccgagcaggatacccaaggtgtagatattgcttatttccgtgagcttttagtgggtgttgcaatcaatgcagcacgtttagataaggcgatggagccttatttatcacgtcaactggaagagttaggccaagttgaaaaagcgattttacgtttagctatgtttgaactcagcttccgtgaagatgttccttataaagtagccattaacgaagcgattgaattggctaaggtgtttggtgctgatgacagccataaatttgtcaatggcgtgttggataaagctgcaccaactgtacgtaaaaaataacgttcttcacgtttcctctatggtaaattaataatccaaggccggttactccggccttttatttaataagcattgcttcataggaaattgataatgccttgtggtgaattctccctcattaaacaatatttcacttctcagccagttaaacgcaaagatgtgagtacgggaattggggatgactgtgcaatattgactgtacctgaaaagcaacaagtggcaattagtactgataccttagtcagtggaatacacttcctgccaaccatttcccctgaagatttagcgtataaagcattagcggttaatattagtgatttagccgcggtgggggcagatcctgcttgggcctcattagctttaacattgccaaaagtcgataatgattggcttgaggcctttagtcgctctctatttgcattagcagagtattattctattcaattgattggtggggatacaaccaaagggccattgagcttaaccatcacaatacaaggtttagttcctcaaggtatggcactattacgctcaggggcaaaaattggtgactggatttatgttacaggctttttaggtgatagcgcggcaggactcgcggttttacaaaatagattacaacctagtcaaccagaaagccgagactattttattactaggcatttgcgtccgcagcctcgtcttttacaggggcaagcattaagatctttagcaagtgctgctattgatatttctgatggtcttatttcagatctaaaccatattttaacggcaagtggttgtggtgctcgtattaacttagatgcgttgccttattctgcggcaatgaaatcacaggtgagtaaagagcaagctgaaatttgggcattaagtggtggcgaagactatgaactatgctttaccgtgcctgaaataaatcgtggggctttagatattgctttagcccatacgggagctgactttcattgcatagggcaaattatgccaattgcagaaggtatacgttatttacgtgaaggtaaagaagtgcaccctaatctgaaagggtttgatcactttggtgataataaataaatcatatcgctataaacaaaaggcgcttaatgagcgcctctgaaatcaaaataatgttattaatcattttaatgataattcaagattagcttttcttcacaaattcagattttaatttcatttgtccaaagccatcaattttacaatcaatattatgatcgccttccactaaacgtatccctttaacttttgtaccaattttgagtggcgttgagctaccttttacttttagatctttaatgactgtcactgaatccccatcggctaataaattaccatgggcatctttaacaatcagctcatcgctatcagttgttggctcagcatcgttccattcgtgggcacattcagggcagacatacattgccccatcttcataggtatactctgagttgcatttaggacaagaaggtaatgacataataatactctcaaattttttcaaaatgggaagtgattaatcgtcacaaagaggataacacttgcccgataaacaaaaggacacattatcgtttcagcgtaaaaagtctaatatgatgacccaaatgaccaaaaatagtattgccacagataatgcgaaagaataagagtataatagatctgatagagttttgcatctttcatggattattggataaaagatgagaaaaagtagattaaatataggaggtaatacacaaaataataagaaataatatcatttaaaaatataaattaacttattgattttataatgctttattttgttaacttagataaaataactactctctctttaaaagagagtatcagtaataatagtgttaatcttcttgttgttattttataaaatttatcaccggcctcgttcaatcagtttgggggtctgagttaataacggtccaatcctcaattcttaaaccatcaactctttcaaattctcgagtattattggtaacgactattagccccttacttctagtatgtgcggctatatgtaagtggttatcaccaacgtgttttccctgtttttctagtgttgctctaatgtctccataatgaaaagctgctaagtcatcgtaagataaaacagtcagtcgagaaacaaagtcgttaaccgtagctaagtttttggctggatttacacttttttcagcaccaaaaatgagctcagcgagtgtaattgtagaaatagctaattgttcagcatgttggttgaattttggtaataaaaactcaggcttgcgtttaatagtgaatataacaataatttgtatctaataggtatttaatcatcaaaggatcctctttcacttgtggcttgatcaggcctttcagataagaaatcatctgttacagacttttctgataagaaaaagctatcccatgcattttgtataggtgtgattattctctctttgcctttgacgcgaacaaaaacttcttttacatcatccggaaatcgagtctcagcgggtaatcgaacattttgtgttctattgctcataaatactttgccatactggatcatagtaatagctcctataaaaactgccatatagcagtttttataggataccaaataggttgtgtgaaatatatacacaacctattaacctattaatgtaaaagattatttcctatgagctatcaccgagcctcgttcaatcagtttgggtgttaacactaatagattggcttgtgcttcaatatcttccatacgacgtaataattggcttacagcaagtttgcccaattcatctttgggttgatgaatagtcgttaaaggggggatcatataagaggctaaatcgatgtcatcataaccgacgatagaaatatcatcaggtacacgtagtcctttttgataaatcgcttggtaagcaccgaccgccattgcatcattacaggtaaatacggcctgtggttgtatagggagtgagagcagtgtttgcattgcactaaagccacctgcaaactcaaaatcactggttaaaaccagctctttacgaatgggtaacccagcttgttgcatcgcattatagtagccttgtaggcgatgtttagcgggaagtttatcttggggacccgcaatacaggcgatgtcagtaaaacctttttcaattaaataattcgtggctaattctccccctaatagggagttatcttgaataatatcgctactgtattcaaatggagaccaatccatcatcaccatgggtaaccgtggataacgatttaatacttcacttgatggtgcgcgggcttcagtacacattaataacagcccatcgacacgcttttgtagcaaggtttcaaggctagtatccatgcgctcatagtcgccttcggtgttgcataaaatgaggctatagccttgttcatagcaacttcgttcaacacctcgaacgacttcagcataaaaggggttattactggcggtaactaacatccctatggtacgtgtgcagttcatttttaaactacgagctaatgctgaaggggcgtaatttaaggttgctattgcatgattaacctttgcgcggataccttcactcacataacgattgttattgataacatgggaaacggtggatgttgaaacacccgctaaacgggcgacatctttcattgttgccaaaatattatgctcgctctgctaaaaatgacttaatttcatcacgccaagggacggaggattgcgcgccatgacgtgtcactgcaattgccgcggctgcatgggcgaaacggatcgcatcatgagctgatttaccttctaatatcgctgtaacaaatgcaccgttaaaggtatcacctgcggcaatagtatcaactgcttcaacacgaaaaccgggaatgatcataccggtgccttgttcactaaaccatacgccacgactgcctaaagtgattaaaacgtgttttatgcctttactgtgcaaaatattagccgctttagctgcacccacttcatcatgcacagaaataccggttaatatttcggcttctgtctcatttggcgtaataatatcaataaaactcagaaattcatcagataacggctgtgcaggagcgggatttaaaatcacttttgtttgatgtgctttggcttgttttgctgcctcaaagacagtgtctagaggggattctaattgcattaataaagcatctgcttgttcaataatatgacgatactgatgcaaatggcttggagtgagagcactatttgctccggcaacaatgctaatgacattttcgccttgttcattaactaggatcattgctacacctgtaggtgtcttgggaataatacgaattgcatcagtatcaatattatctgtttttaattgagcgatgatttcgcgaccaatagcatcatctcccacacaggctataaacgtgatatcggcaccactacgtccacaagcgacggcttgatttgcccctttaccaccaaatgctattttatagtcatgaccaatcacggtttctccgggcttgggaaattgtgcaatattcataatatggtcaacgttaatgctacctaaaacagcaaggcggggagttgtcatagcctttatcctttgaaaacctagtttataacgaaactaaccacgcagtgaaagtactacgtggttagatgggtgattatttttgagtgactaattcaagctcaacaggaatagtgggatccactttttcccctttcagaattttatcagcggtttgaataccaataataccaatttgatcggggcgttgtgcaatagtcgcacctaaaacacctcggttaaccgctttaatgccatcatttgtgccatcgaagccaacaactaagacatcggtacgacctgcagtttgtaatgcacgcaatgcccctaatgccatttcatcgttttgagcaaataccgcttgcactgaaggattagcggttaatagattttgcataacattaaggcctttagtacggtcaaagtcagcaggttggcttgctaatatattaagtttgtgagcatcaacagcttgtttaaagccttctccacgctcacgagaagcggaggttccggcgatcccttctagttggatcactttggcatcattacccactttttccgcaatataatctcccgccatttttcctcctaggcggttatcagaagcaacatggctaacaacctcacctttattggctactctatctagggttactacaggaattttagctttatttgccattaacacggcattacctacagcatcagaatccgttggattaatgagcattaaacgggtgccttttacggttaagtcctgcacatttgccaattctttggctggattatccattgaatcaagtacgactaagtcataacctaatttatccgcctctttttgtgcactgtctttcatggtgacaaagaaaggattattgagcgttgaaataacgagggcgatagactcttttgctaatgcattggcacttatggtagcgcttagagcaaccactgagagaagcgttgctattttttttagtttcataatatattcctgtcggggttcggattaagagaaagcgtattattttttgttatcaaccagcacggcaagtaagatgacaacagctttgactatcatttgataattggatgatatgcctaataaattgagtgcattattgagaaagcctaaaattaacgcaccaataagtgtgcccattatgcgtcctttaccgccagcaagactggtaccacctaagacgacagcggcgatagcatccagttcataaccattgccagccattggttgggcggaagaaagacgagcaacttcaatgacactggcaagggccgctaataaaccgcaaagcgcataaacaataattttgattttatcgacactaataccagataaacgggttgctgcttcgtttcctccaagggcatagatatagcgacccaagcgtgtgtgatgcaatacataccacgcgcttaaaaagacaatcatcatcagccaaataggggtggggatcccaaaggggcgtccaataccaaaccagctaaacaggtcggcattatcgctaaatcctgtatttattggactgccatcagtataaacacgcgtgacaccacgcaataacagcatcatcactaatgtggcaataaatgcctgcactttacctttagcgataatgacacctgtaacgccaccaatagctgctcctaatgctaaagcaccgacaacagccactaacgcattaacatcagcccctaccatagaagcagcaacagcaccggttaaagcgagtaatgaacctaccgataaatcgataccagaggttaaaatgactaatgtcatacctacagccataattgcgttaacagaggtttgttgtagaatgttaaaaatattatttaaggtaaaaaaattcgggctgagtgttgaaaccacgacaataagcaacaataaggcaatgagtgatttttgttctaataaccaagccttagagaaccatcgttttgacgctggtattgattttgtactcatctcaaactcctactgtagcaccatattgtttaccaacagccgccgccattagcatctcttgtgtgacattattggcagaaaactcaccgctgatacgaccttcatgcataactaaaatgcggtcactcattcccattacctctggcatttctgaagagatcaaaatgatgcttaatccctcttgtttaaacttattaattaattggtaaatctcttttttcgcccccacatcgacaccgcgggtaggctcatcaagaataagcactttaggacgagtcattagtccgcgagcaatagcgactttttgctgattaccgcctgataaaaaaccaatgatctgattgatggacggggtttttatgttgaacaatttaataaagtcactgacagttaattgctcttctttatgatttaagatccccatagtgcgactaaaataaggtagcgccgtcagtgacatattctcttttactgacatacctagcactaaaccatcgcgttttctgtcttcagagatataaacaataccttgggcaagtgcatctgcaggctttttgatctgacaaattttaccttctaacgccacgctaccttgtgtttttggcaatgcaccgtaaatcattttcattaattcagtacggcctgcgcccattaaccctgaaatacctaaaatttcattttcatatagggagaagctgacatcatgtatatctgcaccacttaagtgagagacattaagtttagtttttcctgcaggaatatggatgcgagggtattgatcttctaatttacggcctaccatcatttcaataagtgtctcttcttgtaatgaagaaacgggcttttcgccaataaattgaccatcgcgcaacacagttacatcatcacaaatatcaaaaatttcttttaatcgatgtgagatatagacaatgccacaaccttgatttcttaattcagttatcacactaaacagagagcgagtttcggtgtctgtcaatgcatctgtcggttcatccataataatcactttagagccaaaactgagtactttggcaatttcaaccatttgctgatcaccaatggataattcagaaactgagcgatgactgcgataaggaaggtttaagcgagcaagtaatttatccgcttctgcatacatttttttccaatcaatggcaccaaatgcacgggtaaactcgcgacctaaaaagatattttctgcaatggttaattcagggataagattgagttcttgatggataatacctattccggcttcttgagaagacttaggaccattaaaagagcaacgttccccttgataaataatttcacctgcgtctttttggtagatacctgttagcactttcattagtgtggatttacctgcgccattttcaccaacaagtgccatcactcggccaggataaattcgtaacgtcgcaccagataatgcttttacgcctggaaatgatttatcaatattttttaattcaagtaatgcttccatattggcctcagaaagtcacaccagaaaacagcacgatattggcataaggagagcattcacctgttcttatcaccgctttattatctggaagttgtgttttaaattcttcatgagtgacataaatgatctcgataggttttttttgttgttgttctaataaatgcaaataacgggttatctcactaaaaagaagtgggtttatatttttaatttctatggcaagcataacggcttcgacttgcatttcatgggtgatcgtttgtaacactgacataaagtcagggatcccctgagttaaagcaagatcgatacgctcaacagaggagggtatgggtaatccagcatctgcaatcgttattttgtcagtatgccctaaacgtgcaattacgctagaaattgaactattaagtaatacaccttttttcatctttgcctcctcagcgaaacgtttcgctgttctacatagtaggaaatgaaaataggaaaacaagttggatttatttatattgtgaaggtgatcgaaacgtttcgttaaaggaaagaaaaaaggaaaaatctaactgattgaatcaattaacgctgaatggattcaattttaaaattgataaattacagttaatttcattaaaaagtgatctttaacaagatttgaaaataattaaaaaagaaaagaaataagggcagtttttacaagaaaataaagtcagaatttattaaccttatcaatagtctctccggctttacaagcaagagagacttttgaaatattatctcaaagaatgagcctgataagctttaatcgatttttcaatgcctgttgcatcaagtcctaaatcggctctgatctcttcttgtccaccttgtggcacaaaaagatcaggtaaccctaaattgagtacgggcactaaacaacgctcttgcattaataactcgttaacgccgctacctgcgccacccataatggcattttcttctaaggtgaccagtatgtcgtgttgtttggcaagggaaaggatcagttctttatctagtggtttgataaagcgcatatctgcaactgttgcatccagtttttctgcaacatctaaggcttcgggtaataaggttccgaagtttaaaattgcaatacttttaccttggcgacgaataataccttttcctataggaagttcgctcagcggttgtaatggcgcaccaacccctgatcctctaggataacgtacagcgacaggcccttcttgataatggtaacctgtgtgcaacatttggcgacactcattttcatcgctaggtgccataataatcatattagggatacagcgtaagaaagagagatcaaaagctccttggtgggtctgaccatccgcaccaacaatgccaccacgatcgatagcaaagagtaccgggagtttttggatagccacatcgtggatcacttgatcataagcgcgttgtaagaaggtagagtaaatagccacgatcggcttataaccaccaatagctaatccagcagcgaaggtgacggcgtgttgctccgcaattgcgacatcaaagtattgtgcggggtactctttagaaaagcgcaccataccagagccttcacgcatagcaggggtgattgccattaacttttcatcagtggcagcttcttcacataaccagtccccaaaaatttttgaaaacgtcgggcgtgcattcgggcttttaggtaaagtacctgtctttggatcaaatttaggtaccgcatgccaactgattggatcttgctctgcgggagcgtaaccccgaccttttttggtcataatatgtaaaagttgcggcccttttagatcgcgcatattcgtgagcgtttgtactaaagcaataacatcgtgaccatcaactggaccaatatagttaaaacctaactcttcaaacatggtgccgggcacaaccatgcctttaatatgttcttctgtctttttcagtaattctttaattgggggaataccagaaaagacttttttgccaccttcacgtagcgtggtatacagtttgccagatagaagttgtgcaaggtggttatttagtgccccgacattttctgaaatcgacatttcattatcgttaagtaccactagcatatctggattaatatcaccggcatgattcatggcttcaaatgccattcctgcagtaattgcaccgtcaccaatcacacaaacagtctttctgcctaggttttcttgctctgcagcaacagccatacccagtccagcactgatagaggtggatgaatgaccaacacagagtttgtcatattcactctcatcacgccaagggaagggatgtaagccgtttttttgacgaatagtatcaatgcgatcacgacgacccgttaatattttatgaggataagcctgatggcccacatcccaaatcagattgtcaaagggagttttataaacgtaatgaagcgcaaccgttaactcaatagcacctaaacctgaggcgaagtgaccacttgagcggctgacactgttaagaagatatagccttagctcatcacagagtttaggtaaactctcttttggtaataggcgtaaatcttcgggtgtttcaaccaacgccaatgtgggatatttttcgatatcaatgctcatgtgatgcctattaattaatgacttgtaatagggaaagagcaggtaagctgctctttttattttttattagtttttccgttctacgataaaattcgctaattgttttagcgtagaggtatcgtactcgtattgttcaagaaacgctaaggcatccaatgcttcgttatacaattcctgtgctttcttttgtgcttgtgctaaaccaagtagagccggataagtactttttccagcttcttgatcacttccctgtcgctttccagtctcttcagtgctcccaataacatctaaaatgtcatcctgaacttggaaagccaagcctatagagtgggcatatttatccagtgcaggtaacacatcgtgccctttttgccctgcgctaagtgcccctaggcgaaccgctgcacgaattaatgcacctgttttatgtaaatgaattttctcaagagcgacaagatcaattgatttatcttcggcatcaagatcaagtgcctgtccaccacacatacccgctaaaccactggctgtggctaattcagcaatcatggctacgcgatcggcaatggcgacatcaggcatcgcatttttggctaaaatttcaaaggccaaggtttgtaatgcatcacccgctaaaatggcattggcttcgccaaactcaatatgacaagtgggttttcctcgacgtaaatcatcattgtccattgccggtaagtcgtcatggatcagtgaatatgcatgaatgcactcaatagcggctgctggcacatcaagattagcaacaggtacgttaaacatttctcctaccgcataaacgagaaatgggcgtaaacgtttcccccccaagagtgctccgtagcgcattgcttggctgagtggcatatcagaaaaaggcaacgtttgtagcgcttggttgagtgcttcatcaacacgctgatgtgcagaatgtaatttttgacggaacgcatccgtacataaagttgcgttactcaattattcagcctcttggataaaatcatcaggtgtagcgtcatcatcctctttgagtaagatgcgaacacgttgttcagcatcttgtaatgttttttgtcccacacgagctaaacgaacaccatgttcgaactcattaagggcctcttctaaaggtaattcacctgattctaagcggttaactatttgctcaagttcttgcatcgaagcttcaaaacttggagtttgcgtggtgtcttggttaattgatgtcgtttttttagccataatatttttgatgataaagcatgttagctgaataatagtgatcatcttactacaattgagaagaaaatttcttattcagtcagcgatttttgcgggtgaggcctaaatattggtgatatactttgtgacttttataaactccagtcaattaatatcactgtagtttatgtctctacttaataacctatgaccattgactatgaagtttattattaaattattccccgaaatcacgatcaaaagccaatctgttcgtatacgttttatcaaaattctgaccagtaatattcgcaatgtattaagtacattaggtgatgatatcacggttgttcgccactgggacaacattgtggttgtcagtaaagacgaaagtaaaagcgaagcggtgtgtgatgcgctaactcgtatcccaggtattcatcactttttacaagttgaagagcatagctataccgatttacataatatttttgaacagacctttgctgcctttggtcatttagttgaaaacaaaacgttttgcgtaagagctaaacgccgtggtaaacacagttttacttctaatgaagtagagcgttatgtgggtggtggttttaaccaacacgttgaaagtgcaaaagtaaaattaactcgtccggatgtgaccattaatctagaaattgaagatgataagctgatcctagttaatgctcgctatgaaggtattggtggtttccctattggtacacaagaagatgtattatcacttatctctggtggttatgattctggtgtatcaagttatatgttgatgcgccgcggtagtcgtgttcattactgcttttttaatcttggtggttcagcccacgaaattggcgttaaacaagttgcacattatctttggaaccgctttggacgctctcataaagtacattttgttgccgttgattttgaacccgttgtggcagaaattttagagaaaattgatgatggccagatgggggttgttctgaaacgtatgatggtgcgtgcggcatctcgtgttgctgagcgttatggcgtacaagctattgtaacaggtgaagcattagggcaggtttctagccaaacattaaccaatctacgtttaattgataatgcgacggataccttaattctgcgtcctcttatcacacacgataaagaaaatatcattaatatcgctcgccaaattggtacggaagattttgctcgtactatgccagagttttgtggtgttatctccaagaatcctacagtaaaagcggttaaagccaaaatcgaagctgaagaagaaaaatttgatttttctattctcgatagtgttgttgaaaatgctaagaatatggatattcgccgtattgctgaagagacggtacagcaagtaacagaagttgaaatggtctctgagtttgcaacgaatgacgttgtactggatatccgctctccagaagaacaagaaaactcacctctaaaattagagggtgtagatgttaaagaattaccattttataaattaagtacacaatttggtgatttagataacagcaaaacttatttgctctattgtgagcgaggtatgatgagtcgtttacaagcactatatttacgtgaacaaggctttaataacgtaaaagtgtatcgtaagaagtaatatagttattttttatgaaagtcgtattaataatataatagagatacccccccaataattaggatgctaatatgattttggggggatatattaaaatgcagtgtttattaaaaattattttgaaattcttcagcccttttttccaactctgctaggaatgatgtttttgctaactcgtgtgcattaggtgacataatagcaataatttgatatctatttgggtaaagccaatgttgacaataaactaagtaatgatttgattttctttgtatttgaggcatattttcatgccacttaggttcattaggtattctaatatgtattttagaaatgagagattgacataatttcgcactattttcccatttaccatcagcacctaaataacaagataatactttttttctttccaaagttttaataatttagcgtattcattagcaatagttttattttcaatatcaggatgtattgaaatttcgatcatatttattaatggttattaaatttaggtttacttagacctaactttttatgctctgtttgtattaatctttgcatatcagcacttattatattaggtttcttattagttgtttttgatggttgatgagtttgttctataaatgaaataaactctgttaatacactccgataatgagctaaagaacgaccaaataagagtacactttgttttttttgtgtatcactctttggtaatgaaagaagaatatttttgatatcagttaaagaattatctaaacgttttatacttttgtttatttgataataatcatcttcattaataaaataatgaggaggatttatccatttctcttttaaatgaattaaatgtttattaattgattcggctaaaatattcattttttcagtagcttcatcaatagggatagcaacgaattggttaaattgcgctgaactgaaagaatattggatatccggtgtaaatgatagttggttatgtttgaagctttctgctggcactgaggctaatcccatagaaattaaagtaacaagtttgggtaagttcttgtgatattggagagttttcattatgccttatcctccagaagttattttacattttaacctgttagtatgttttttgaaatcaaaaacaagaaacaaacattgaaataagtcttaaaaatagatttataactattaaataatatgtttattaataagattaggtgttaagtaagagatcctatatatggtatttacctatccccaaacccagtaaattcatcttgataattataaatacctggtggtaatacaagttgtttagcgacatcagctgcaactgctttaccttttaggcgctcaataattttaagtgcgaaatctatagtggtagcaggggcttggctagtaatcagattgactctttcgtcaaagtaaacccgataatcaacccattttttaggttcgattttatcttttaagccggggaaacctgtcatattgcctattggaaagaggttatgagactctaagatgatcgcaggagctgcgcaaatagcggcaactagtctattttcactgtgcatgcggcgtactttttcaacaacaagaggactatctcgtaaggtttctgcacctattaatcctccgggtaaaataatggcatcataatggtgatcaacaacacgaactaatgggacatcagcaattaatttgatccctcgtgagcaggtgatcactaagtcatcaacatcatcttcagcactagcaagtatgaccttaattccagctctaacgagtaaatcagcggtggtaacaacctctgtttcttcactaccattagctagacagatgagtgcggatatggtcataattgccttccttctgttttataaattgaaaaagtcgcttattttcgggtaacacgagtccttgctctgatgccctacgtaatagatagcctgtgatataatcgatttcggtatggcgttgatatttcacatcttgatacatagatgagtaattattagcagtttgctctatggtatcgataatataaccatgtaaatgtgatctagaggtaggtataacaccttctcgctccattacctgataaacttcatcacagactttctggatatgctcagggtattttaataaatcgccattgcgacattgataaaacaccgttaaagggttgataacacaatttacggctaattttagccagctaatagtatgaatatcattgtgccaagctacatccggtaaagcttgatgtaaaatttcagctaaataaccgtattgacgtgctgttgtatttagtgggccaatgtgggtgatcccttctgctgtatggagcactttttgatcttgttgataagcaccatgagtgattataccttgtaatatcgctcttttagtcggtgtttcaggtagggtgagctcatctagtgttcccataccattatggatcagtaaaatcgggcaatcagcagagaggtgagggataagtgcattaaccgcgtctgaaacttgccaagactttaagcaaacaagcagtaactcactgtgttgtagccatgttttttggttggctataatgcgttgttgaaatgggataccattaatggagtcaacgttaacgtcaaaatcaggttgaggtattcttaaccatccttgtacttcatgggcttgttgcgttaatcctgcaatccaaagtttaccaattgaaccacatcctaatacggttattttcatcatttttctcctgctaaatggtaaacaggcgctccatattattcatctaacattaacctaatattattaacagttcggtaattttatcaatgcaaattgagagctatatcaaattataacatcgtttatcttcacttgctgaagctatctctgctttgttatatggaaagtcaagagtaatgacatgagtatggcttttttgctgagtgaaaaacagctattattcaggttgtttttatttattgaggaagaacgaatgccatcttttgatatcgtatctgaagttgacttgcatgaagtgcgcaatgcggtagagaacgcacaacgtgaactgactactcgttgggattttcgtaatgttgaagcaagttttgaattaaacgaaaaaactgagtcagtaaaaacaactagtgtatctgaatttcaggtgcagcagttattagatattctgcgtgagaaaatggcaaaaagagggattgatggtgctgttttaaatatccctgaagagatgactcacagcggaaaaacatacagtgtagaagcgaccttaaaacaaggtattgatactcctttagcgaaaaaaatcgttaaaatgatcaaagacagcaaattaaaagtacaagcacagatccaaggtgagcaagtacgagtaacaggtaaatcacgtgatgatttgcaagctgtgatgaaattagttagagagggtgaattaggtcagcctttccaatttaccaattttcgtgattaatgacgaaagtataaaaaatgcgctgtttggtttattcagcgcatttacagggtatatgaggtttaaacgccgagcactaacgattctaatgtcgctcttggtgtctgcttggtatccactttgatataagcactttgttcgtgtgccataattaccacttcattaacaccaggttgttgcttaaatttctgctctaattgttgttgttgagcatttgataaatgtgacggcaattctatacgtaagctactaacataaggtggttgacgtaatgttaagctaatggcaaaccaaactaagccaatcaataaacatccagcaaagactgcttgagcatcgtaatgttggtagagccatccacctaaaataccacctaatgctacacctagaaattggctggtggaataaatccccattgccgtgcctttataacctgctggtgcttctttactaattaatgaaggtagcagtgcctccataatattaaaaccaataaagaatatctgaatacctaaaataattagccacaagctggttcctgaaatcataaaaatagcttgagcaataatcagcagaaagatacacagtaagaacacttgtttcattttacgttttttttctgcatagataataaagggtaatactgaaataaaggcaatcagcatagtgactagatagacaacccaatgtttctcattaactaatccggcattatgcatgatcaaaggaagtgcgacaaaagcggccatcaataaagtgtgtagtgaaaaaatcccgacattaagctttaataattgcgcatcaaataaaacttttttgacacttcctcgtacaaaacttgattctcgattaagtatatgatgttcgctattcggtacggtaatgagggtgatcataatcccgccgaaagcgagtagggcaatgccccaaaatagaccttgtaagccaaaaatatgtgtgagtattggccctaaaacaagggctaaggcaaacgtaataccaaagctaatgccaataaaggccattgctttggttctattttgttcgcgggtcagatcagataatagagccatcactgcggcagatatagctccagcaccttgtaatgctcgcccgatgataatgccataaatgctgtcacttaaagcagcagtaaggctaccaacaataaaaataattaagccgaaaacaatcattgattttcggccaaatttgtctgagaaaaatccaaaaggaatttggaagattgcttgagttaatccataaataccaatagctaatccaattagcgattctgtcgcatgttgtagttgcagtccgtaggtggttaaaacgggaagtaccataaacatgccaagcatgcgaagagagaaaacagctcctagtccccatgtcgctttgcgctctaatggagtcattttattatcattcatggattacctcgtattactgatacctcattgtaatagtattttgtcacgaggttaatcaataaatgggatacaaaaaaagacaaaattgtactgataaggctgaatgtggcatttaaactaaaaatgccagtcatgattgactggcattagcattttttgcaattgaaattacattatctcagataagcgagaaccgtttctgttgaactggtgggatcaacagacatcattacacttaatgatgtaatggcaatgatagaaaatataaataattttcttgcccacactttatcattggttgctttataaccagataatgccatgcccaaccaccagatactgactgcagaggcaacaatcaggtatttataccctgcatatcccactaaagttagcatcagcgttgcaaccataaaggccagaatatagagaataatatggcgcttagcgactgagatccctttaataacaggtaatacggggatattggctgcttggtagtctttaaaacggaaaatcgcaatggcataagagtgaggcatttgccacaaactaaagataagtaataaaattgctgcacccgcatcaaattcaccgctaacagcacagtagccgattactggtggtgcagagcctgataaactaccgatcagtgtgccataaacagatttacgtttcatatagaggctataaaccccaacataaataataaagccgaatacagcgataaacattgcaagtgggttggctgctacatagagcagcacaacacctgcaatacctaatactgaggcataaataaggctaatttgcgggtcgattaatccttgaactaatggacgattcttcgttctttccatgatacggtcaatatcacggtcaatatagttgttaaaaacacaaccagaagcaacgaccagagacaccccaagtagagtcgcgaaaaatagggggtagtcaatctcgccttttgaggcgagaaggaaaccacctatcacagaaattaaatttccgaaaataattcctggtttggtgacttgtaggtattgcttaatcatagcgacaactcttaatccatcatcatattgatgttcaggttgtacataatccacagtgagccaatcacaacaatgccgataatcaacaaggtgaataggaatgcgataacgttccagcgctcttctgaggacgtgttcatatgtaagaaacagactaaatgaacaacaatctgtacgacggccataccaacgactgtccataagatagttgaggttgtagctgttccttccatcaccatccaaaatgggatcacggtgaggataacggacagaataaagccaatcagataggacttcatgctgccgtggcttgcgcctgaaggagaagtatttggatgactcattacatcgctcccatcagataaactacggtgaacacacagatccagacaacatcaaggaagtgccagaacaggcttaagcaacttaaacgagtgcgattaacatcagttaaaccacggcgtgatacttggatcatcataataataatccaaactaatcccgctgttacgtgcagaccgtgtgttgatactaaggcaaagaatgccgataagaatgcactgcgatctgggccataaccttcagcgataagttcatggaactcatacacttccattaccacgaagcctaaaccgaataagaaggtaacgaatagccacagattgacttggctaacactacctttattcatgctaagcatggcgaaaccaaaagtgatactactaaacagtagtaagaaggtttcaactaaaacaaaaggcaggctaaagatttctttacctgaaggaccatcagcaatcccgttaacaagcaccgcataagtggcgaataagctggcaaacaggataaggtcgctcattagatagatccagaagccgaaaactttcgtcgctcctgcatcgtggtgcccatgatgctcatgggcgtttgcgttatttaaagtttgagttgacattatttcacacctgcttttttcagttcttcataatgcttattctcgatggtttcaatttcaggtacttggacatagtaatcaacatctgtatcgaagcttttcgcgatccaagtgactatcattcctgcgaaaccaacaatcgctaaccaccagatatgccagatcatggcaaagccaaacactaagctaaatgcagagataatgacgcctgctgcggtattttttggcatatggataggttcatattttgcagggcgctgataagcagtacctttttctttctgatcccaccactcatcacgagctttcacttgcggttcaacggcaaagttatagaaaggtgcaggagaagaaattgaccattccagagtacgtccaccccatggatcacctgttaaatcacggtttaagtggcggtcgcggatactgacgtaaatttggataacttggcaaacaataccaagagcaatcagagcggcaccaccagcagcaaccatcagcattgggtggaattctgggttgatattttggcttaaacggcgagtcatacccataaagccaaggatatacagtggcataaaggccataaagaaaccgataaaccagaaccagaatgcgcggataccccatttttcattaagcgtgaagccaaatgctttagggaaccagtaagtcataccagcaaaacaaccgaataccacaccaccgataatgacgttgtggaagtgagcgattaagaacaagctgttatgtaatacaaagtttgcgccaggaaccgctaatagtaccccagtcattccccctactgagaaggtgactaagaaaccgattgtccatagcatagggcttttatactcgatacggccctgatacatggtaaacagccagttaaagattttaacccctgtgggtatagcgatgatcatggtggctataccgaagaaggcattaacgttggcacctgagcccatggtaaagaagtggtgtaaccaaacgataaatgataagacggtgataacaacggtcgcaccgactaaagaggtataaccgaatagacgttttttagagaacgtcgcggtaacttcagagaacacaccaaagactggcagaataagaatataaacttctggatgaccccaagcccaaacaaggttgatgtacatcatcatgttaccgcccatatcattggtaaagaagtgtgtaccaagatagcggtctaacgtcagtagtgtgatagtgacggttaaaattgggaatgcagcgataatcagtacgttagtacataatgcagcccatgagaacactggcattttcatcattgtcatgcctggtgcacgcatacgcaggatagtggcgaagaagttaacccccgtcagaagcgtaccaataccggatatctgtaaactccatatccaatagtcgaccccgaccccaggattgtactccaagcccgaaagtggtgggtaagctaaccaacctgtttgtgcgaattcaccaatacctaaagagatattgataagcagtacaccgacgacaaagaaccagaaactcagtgagtttaggaatgggaatgccacatcacgcgcaccaatttgtaaaggtacaacaaggttcatcagaccgacaacgaaaggtgttgccatgaagaaaatcatgataacgccgtgtgcggtaaaaatctgatcgtagtgatgaggtggtaagaaaccggcttcacccgctgaggcgagtgcctgttggcttctcatcataatggcatcggcaaagccacggaacatcatgaccattgcaacgatgatatacataataccaatttttttatggtcaacactggttaaccattcgctccatagccatttccacttacggaaataggttaaagcgccaacaacagcaagaccgccaagaatgatgccgattagggttacgacaacaatgggttcttgtagcgggattgcatcgagagttaattttccgaacatgcctttattcctctgctcctgcatgtgccgcgtggctcatgttcatattcattgttgcatcagagtgttcagtctgattgctaccggtgtgagcgccatgacctgtatgaccaaatttagagatggtctcttggaataacatcggcttcacgcttgaatagtaggtcactggatttttctggcttggtttagcaagttcatcaaatgcagcggtggtatttaacgtatctgatgactgttttacttttgcaacccatgcatcaaagcctgcacgatcaggtgtcgcaatggcggtaaacttcatgtcagagaaaccgtgtccgctataacttgctgacataccttggtattcacctggttcattagcaattaagtgaagtttggtttgcattccagccatggcatagatttgtccacctaagcgcgggataaagaatgagttcatgacagaatcagaggtaattttgaaattaacaggaacattggttgggaaagccagttcgttaacggttgcaataccttgttctggatagataaataaccatttccagtccattgaaaccacttcaatggtaaccggtttctcatctgaaactagtggtttatagggatcaagttcatgggttgttttccatgtgatggttgccaatatcacgataatgataatcggcacggtccacacgacaagctcaattttatttgagtgagcccaattagggcgataagttgctttagtattggattcacggtagcgataagcgaaaacaatcaccatcagaattaccggtatcacaacaatcaacattaaaccaagcgcaatgaggattaatgttttttgctcagcgccgatagcgcctttgggattcattaacgccatatcgcaaccacttaaaagaacagcggctgctaatagcgagagtgtcccaatactttttatgtatttcataagtctcatccaacgacccaaatgataaaggttctattgttgtttcatcagtatcagtaaggacattttacggtaaggttgcgacagtgtaaacaattgtaatggtaagtaagtgattggttagtcttttgtgttaatgtgatcacaagtaattaaactattaaataaatgttaatttaattattgtgaattaactataatttcataaagtagcatgtttttaaaataaatacatatttttacaaaaaaaattacagcaaaaagtgtaagaaaacgttttttgtctaaaaagtaaacacagtacaggtctgaggagtattagaaagcaaatttcgttttatcttgatgtttcgtatctttatttaatcgctatatgattttttatatcgcagattgattgtttgttgaatatttctattatagaagaaatttttttattaactgctaaaaatgacaaacagcgaataaaaagtgattcgctgtcacaaaaattaacaattagccatcagaagttatattttaagctatagatcacaccatcttgtaaaaagttttctcctaactttttataagcatagcggtattgaatgcctgtagtaatggaagccgtggggtgccaccaaatagcgacagctccattaaagccattttttccgccattgccataccgtttattacgatcaaactccatctcatgccaatttgtgatgctaaatttttgatttaccaggttaaaatcgtaaccggcaacccaaccaaccacatagccattatttcctgaataataagtttgatcgacataatgtaaagctataaaaggtttaaaccagatatctgctaattgtgtgttatacccaataccataaagtgtattaacctcatggaaattaccgccatattcttttccgggcagtgaccaagtaccatatacatggccataaaggtttaatccactgtcagctaaataaatacggctagttcctttgacggtatagcgctgattatcgccgggctgtgtttgtcgattattaaaaggattttctaagtcaaaaaagccataaaactcaccccatgaaaagtgggctcccccttcaagttctaaataagcaaaatcatctttatgggaagtttggcctgttttatgggtggtatgtgtcgtccagtcaagataattgatactgatattagcaaatccaccgagataattagcctgtgcaggtaaagtgcatgttgttgtaataaacaataaaattgattttcttatcataatgtataattagtttttctgttgtattgtttgtggtgtgaattattctcactgtttgttttgatactataatttataaagtgtttttttatagtgttttgtatctaaaatatgatcacattctagaatattgatctgggttttctttatcggaagtttagtattgattagtttgtttttattattttggtatgttaatgaaaagaatatagagtgagagaagaagaataatgatggcaataagttttaattaacagaaatgacgaaggtgaggcgaaatatctcacgacaccataaaaaagggatagtatcatggcagataactgtttttttcttattaattcggaattttattgtgacctcatttgctgatcttcatgcacttcctgctgagcaacttactaatcttaatgagcttggctatttaacgatgactcccgtccaagaagcgtctttacctgctattcttgccgggaaagatgttcgagcccaagcaaaaaccggaagtggcaaaacagcagcttttggcttaggtttattgcaacgtattgatgcaaaacaatttaatactcaatcattagtattatgtccaacacgagaattagctgaccaagtcgctaatgagttacgtcgactggctcgttttctgcctaacattaaaattctgactctgtgtggtggtgtgccttttagcattcaacgggattcattaattcatgctgctcatattattgtcgcgactccggggcgtttgttagatcatttaaacaagcagactgtcacacttgctgatgtaaaaacattggtacttgatgaagcagatagaatgctggatatgggattttttgatgatattagcgacatcatttctcaaatgtcgacacaacgtcaaactttgctcttttctgcaacttggccggatgaaatcgctaaaattagtcgaaaaattcaacaagatcctgtcactattgagattaattcaccggatgaattgccagcggttgaacaacaattttatgagatctcccgttatggcaaattgggattattacaaaagcttttgagtcatcatcaacctaattcttgtgtggtattttgtaataccaaaagagattgccaagatgtgtatgaagctttgaccgaaagcaaccaaagtgtccttgcgttacatggcgatatggagcaaaaagagcgcgaccaaacattgatccgttttgctaatggtagctgtcgagtgttagtcgccacagatgtcgctgcgcgaggcttagatatcaaagcgctagaaatggtgattaattatgaattatcacacgatccggaagttcatatacatcgaattggacgaacagccagagcgggagaaagtggtttagcgattagtttttgcgcaccagaagagatccctcgcgccaatgctctggaagaaatgttgaatataaaactggattggcaatcagccccttcaggtttatcaatcacaccattggttgcgacaatggcaacactatgtattgatggcggtaaaaaagcaaaaatgcgtccaggggacatccttggtgcattaactggagatttagggtttagtggagaagatattggtaagataaatatccatccaactcatgcctatgtagcggtaaaacagtccattgctaaacaggtatggaaaagccttcaacaaggtaaaattaaaggtaaatcagtaaaagtcagactgtttagataatttgttatatcacctattattttctgtttgagcataaagagataacatagaaaaaggacagcctaggctgtccttgaatagatgattgattgaggcaacttaattagctgtttttttcagtgccaagtaatctaaaatagtcccgataattaagctaacggcgccaataatgacaccatataagaagagtgtagaagtaagctcgcttaataattcactattaatagattgtataaaatcaactgactgaaacatctctaaatttggtaacgaattaataataagtaatattaagctacacaaaaatagtaatacggcaaagagtaaaccataaatcgctaaacggtattgtttaataaataatgttcgttgtaaaaattcgccagttttttgcgtataagtgagtgtatttttagcgatcatcagcaaaataataccgggaacagaggcaacaatagagaaaagatagaacgcttcccagccatgggattctacataccagcctgcaacaggaccaacatagacacggccgatagccgctaaggcggaaagaagggcgaattgtgttgctgaaaaagattgatggcatagtgtcattagtagagcaacgaaagccgccgttcccataccaccacaaatattttcgaaagcgattaccgctcccatgctataaatattttgctcagagatagctaaataccaatagccgatatttgaccccccttgcaaaataccaaagatcatcagcgctttgaataaagtccaacggcgcattaataaaccgcctaataaggctccgacaatggttgctgccaatccaagcgttttattgactaatcccacttcacctgcatcaaatccggcgccacgaataaggaatgtggtacttaagcttaacgcaaaggcatctcccattttgtatagcacaataagtagtaaaattaaccatgcattattacgagagaaaaactcatataaaggctctataacggcttcatagagtgtacgtggaggtttgacggcggtttctggctcctgagctaatagcgtggcgataataccaatgcccattaaggcagccattagccagtacatgttttgccagccaatatatttatctgcaagccatagcgccatgcccccagaaaccagcatcgctattcgatagcccagcacagagactgctgcacctgtgcctcgttcatcggcttttaggatatcggttttataggcatcaaagacgatgtcttgtgaggcagaacagaaagcgacgatgacggctaacgaggctaaccaccataaatgatggctagggtttaaaaagcccatacccgcaatacctaacacaagaccgatttgtgttaataacatccatccccggcggcggcctaagaatgaaggtgtatagcgatccataaacggcgaccagaggaatttaaacacgtaagcttggccaaccaatgagaaaaaaccaatcgtttttaaatcgatattttctactgtcatccatgcttgtaaggttcctgctgttaatgcaaggggtaagcccgaagtgaaaccaagtaacagtaaaataaaagatttataccaagtggtctgtttaaaggcggcttgaagcatgcaaaattccttttaacggcttgtttcttgctatctttacaagccgttttttattaattaacgagcgttagatttgatgtattggctgacggaaggatcttttgccatatcactgacaagctcagataaaacattattaatcgctgccgctattttatcattggatgcgccaaatgggccttgtacattgtagctagtacgataggttttagtgtttgtgctaccattaggcatgctgacaacaacggaaatatctgctttagcactaatattatggcgtagacttccttcactaatatctgcgttcagtttatttatcaccacaattacgtcagctgcggctggagagccaaaagtatagccacgtgccatcatctgtttttgaacgatttcttgcattagaaaagctaaatcacgtgtggggactaaaacctctaacttaccattacgactcatttccgctaagtttttcgaaggtcgtttatcttggctggtgatactaagtgtaattgggcgcatagttggatctgatggtggtacagacatcactggctcaatcgataatttattgcttggtgttgcacatcctgccagcattgtgagcgcaaacacggcacaaagtaaattttttatcatgatagtgtctcgattaagtaattctgccgttttctcagcagataagggtggctattttgcctatcataccactgcaaaagcgtagctaatatccctttaatgaacgaaattatctgatttttatcaatgcgttttattgtgataagaacagatttataacttactccatttctcttgttaaggtgagcattttactcaagagaaaaaataagcgattatcataggtaatgtttaagacaagaaagccatttatctgtattactaaaagttatttattcacttaactaacagataacttctttttttgattgttatgttataaggactgagatgatccgtgatgatattgagaataagctgatttcacgcttttctccccattttttgcaagtcattaacgaaagccatcgtcataatgtacctgcaggctcggagagccattttaaagtcgttattgtgagtgacttatttaatgataaacgcagtgtgtcacgtcatcgtgatgtttatcaaacgttatctcatgaattagataatggcgttcatgctttagctctgcacacttttaccttgagcgagtgggatgaacaacaagataaagcattacactctccaggatgtcgtggtggaagccaacaagattaataagaagattgttaatcgtgagtaaatgatgactaagatgcgtattttttgttctttatggggctaaaaagcagtgttaaccttgtttttatgaaaaaattgaggaataaaacggctctttctcgactcaacccctctagatcgttataatgtcgcgtctaattttcagtaaggtttcgggatgcttctgatatcagggatcctcgtttttttaaatgtggcggccccggttctgaaaggagtattaagtctaatactacttgccgtagattagcttcctttaaagtagaccgagcactaaaacttattttgaggtaacaagatgcaagtttctgttgaaacgactcaaggcctagggcgtcgtgtcacaatcaccgtaccagccgctgatatccaaaaagctgtagacagcgaactgaaaaaagctgctaaaactgttcgcattgatggtttccgtaaaggacacgtaccaatgtctatggttaaacaacgttacggtatgtctgttctgaatgatgttctgggtgatctgatgcagcgtaatttcatcaacgctatcatcgaaaacaaagttaacccagtaggtgcacctgattacaaaccagagcaatacaaagaaggtgaagactttgtatactctgtagaattcgaagttttcccagaaatcgaactgaaagatctggaaagcattgaagtggtaaaacctatcgtgacagttaaagacgaagacgttgataacatgttagaaactctgcgtaaacaacaagccgagtggaaagataaagaaggtgaagttgcggcagaagatcgtgtaactgttgattttaatggttctattgacggtgaagaatttgaaggcggaaaagctgaagatttcgtactagcaatgggccaaggccgtatgatcccaggttttgaagaaggtcttatcggtcataaagcaggtgaagaattcactatcgatgtgactttcccagaagattaccacgctgaaaacctaaaaggtaaaaaagcacaatttgctatcaacctgaaaaaagtggaagagcgtgaactgccagaattaactgaagagttcatcaaacgcttcggtattgcagatggttcagttgatggtttacgtgccgaagtacgtaaaaacatggaacgtgagttgaaaaatgcgatccgtacacgtgttaaatcacaagttatcgatggcttagtgaaagctaacgaagttgacgtacctgcagctgcggtagatagcgaaattgaagttctgcaacgtcaagcagcacaacgtttcggtggtgatgaaaaacaagctctgcaattaccacgtgaattgttcgaagaacaagcaaaacgtcgtgttatcgttggattactgttaggtgaagtgatcaatagtaatgaactgaaagcagaagacgagcgtgtgaaagcgttgatcgacgaaatggcttcagcttatgaagatccatcagaagttgttgagttctacaataagaacgaacaactgatgaataacatccgtaatttagcattagaagagcaagcggtagaaaaaatcttagcaactgctaaagtaacggaaaaagaaactaacttcactgaactaatgaacgaagttcagatgggttaatttttaaccgcgatatcggttttaagcaaaaacccgtggtaaaaaccacgggtttttttcagtttgtgtatatttatcaaattttgtcttgaaatttgagcgattatctccagataattctatagtcattttatcactcctcgcgaggcgccttgaatgtcttgtgagagattggatcatttgcaatggtcatgatcaattatctcaagtaaaattgttgtcattggcaccaataagaatgcaataggagacagatatgtcatttaacgacacccaggaacaattcgcacctaatatggctttggtgccgatggttatagagcagacttcacgaggtgagcgctcttacgatatttattcacgtttattaaaagaacgtatcattttcctgactggccaagttgaagatcatatggccaatctcattgttgctcagatgttgtttttagaagctgagaacccagaaaaagatattaacctgtacattaattcaccgggtggtgtgatcactgcaggtatgtcgatttatgacacaatgcaatatatcaaagcggatgttagcactatttgtatgggacaagcttgttcaatgggtgcatttttattatctgcaggtgcaaaaggtaaacgtatttgtctacctaactcacgtgtcatgatccaccagcctttaggtggataccaaggccaagcgacagatattcaaatccacgctcaagaaattttgaaagtgaaatcgcgtatgaatgagttaatggctcaacatacggggaaatctattgaagaaatagaaagagatactgagcgtgatcgtttcttatccgctaacgaagcgttagaatatggtttagttgataaagtttatacacaacgcagctagtcatattccgttgtaatagctatggagttaacaggttttctttgttatagattgatataaagaaagctgctattaatctctagataaaaaagtctttcttcctcttattcgctgataagaggaataactaagtgaggttaactgatgacagataagcgcaaagatagctctgggaagcttctgtattgctctttctgcggtaaaagccagcatgaagtaaagaaattaatcgctggcccgtcggtttatatttgtgatgaatgtgtcgacctttgtgttgatattattcgtgaagaaataaaagaattagcacctcatcatgaacgcagtgaattgccaacgccacatgaaatccgtaaacatcttgatgattatgttatcggtcaggagctggcgaaaaaagtattggcagttgccgtttataatcactataaacgtctgcgtaatggcgataaagccgatggtgttgagctagggaaaagtaatatcctgctgattggcccgacaggtagtggtaaaacattattagcagaaacgttagcacgttatcttgatgtaccttttaccatggccgatgcgacaacgctaacagaagcgggctatgtaggggaagatgttgaaaacatcattcaaaaactactacaaaaatgcgattacgatgtgcaaaaagcacaacgtggtattgtttatattgatgaaattgacaagatcactcgtaaatctgaaaacccatcaattacacgtgatgtttctggcgaaggtgtacagcaagcattattgaaattagttgaagggacagtagcttccgtacctcctcaaggcggacgtaaacatccacagcaagaattcttacaagtagatacttcgaagatcctctttatttgtggtggtgcttttgccggactggataaagtagttgctcaacgtctaaatacccattcaggtattggttttggtgcagaagtgaaaagccaaaatgagaaagcgagtgaaggggagttattagcgcaagttgaaccagaagatctgattaaatttggtctgatccctgaatttattggtcgtttgcctgttgttgcaacattaggtgagctcaatgaagatgcgttaattcaaattctgcaagagcctaaaaatgccctgactaaacagtatcaagcattgtttaaattagaaggtgtagatttagagttccgtaaagatgcgttaaccgcgattgctaaaaaagcgatgtcgcgtaagacaggggcgcgtggtttacgttccattgtagaagctgcattacttgatacaatgtacgatcttccttcatttgaaaatgcagagaaagtggtcattgatgaaaatgtaatcaatgggaaatctgaaccgctgattatatatagtcaacctgaaaatcaggcatcgggtgaataatatagcgaaaatcagcaatacctcttgtctgatattatctattttctcccttttagggcaaaaaaataggataacgcgtgccaacgcaataaaaatgagggaattttccctcattttgtttttttaatagggaatgctattgaatgtcggaaaactgcccttatatattttgacaatccgtagaattaattttatttggtgagatgcgaataaaattacctgtaaaagcgttaagctaaaaacgaagagagagctctatgaatcctgagcgtccagaacgtattgaaatacctgtattgccattacgtgatgtcgttgtatatccacatatggtgatcccgttgtttgttggtcgtgaaaaatctattcattgcttagaagctgcgatgaacgacaacaaacaaattatgctggttgcgcagaaagatgcatctactgacgaaccaggtgttaatgatcttttttctgtggggacagtggcttctgttttacagatgctgaaactgcctgacggaaccgtaaaagtgcttgttgaaggtattcgccgcgcaaaaattaccacattatctgataatggtgagtatttccaagctaaagcggaatatctagacacgcccgttgttgatgagcgtgaacaagaggtactaaatcgcacggcgatcaatcagtttgaaggttatatcaagctgaataaaaaaattccgccagaggtattagcctcattgcatgcgattgaagaatctgcgaagttagctgataccattgcttcgcatatgcctttgaaattaaaagataagcaagctgtgcttgaaatgtctgatgtaacagaacgcctagagtatttaatggcgatgatggaatcagaaatcgatctgctacaagttgaaaaacgcattcgtaaccgcgttaaaaagcagatggagaaaagccagcgcgagtactacctcaatgagcagatgaaagcgatccaaaaagaattaggtgagatggatgatgcacctgatgaaatggagtcgttaaaacgcaaaattgaagcggcgaaaatgcccaaagaggcgagagaaaagacagaagctgaacttcagaaattaaaaatgatgtcgccaatgtctgctgaggcaacagtagtccgtagctatattgattggatggtacaagttccttggaatagccgtagcaaagtgaaaaaagacttagtgaaagcgcaggaagtacttgatacggatcattatggcttagaacgtgtgaaagagcgtattcttgaatatctcgcggttcagtctcgtgtcagcaaaattaaagggccaatcctgtgtttagtagggcctcctggggtaggtaaaacatcactaggtcaatctatcgcgaaagcgacagggcgtaaatatgtgcgtatggcattaggtggggtgcgtgatgaagctgaaatccgtggtcaccgtcgtacttacattggatcgatgcctggtaagttaatccaaaaaatggccaaagttggtgttaaaaacccgctatttttattagatgaaatcgacaagatgtcatcagatatgcgcggtgatccagcttcagcactgttagaggtgttagatccagaacaaaatattgcctttaatgaccactatcttgaagtggactacgacttatccgatgttatgtttgtggcgacatctaactccatgaacattccggcgccattactcgatcgtatggaagtgatccgcttatcgggttataccgaagatgaaaaactcaacattgcaaaacagcatctgttaccaaaacagattgaacgtaatgcactgaaagagaatgagctaacaatccacgatagcgcgattatgggcattattcgctattatacgcgtgaagcgggtgtacgtagcttagagcgtgaaatttctaaattatgtcgtaaagcggttaaacaactgctgatggatagtactatcaagcatattgaaatcgatgaaaataatctgaaagattatttaggtgtacgtaaagtcgattatggtcgtgctgatacagaaaatcgtattggtatggtaacagggcttgcttggacagaagttggtggtgacttactgacgattgaaacggcaagtgtaccgggtaaaggtaaactgaccttcactggctcgttaggtgaagttatgcaagagtcgattcaagcagcgatgactgtggttcgtgctcgagctgacaaactgggcattaatggcgacttctatgaaaaacgtgatattcatgtacacgtaccagaaggcgcgacgccaaaagatggtccaagtgcgggtattgcaatgtgtaccgcgttggtttccagtttaacgggtaatccagttcgttcagatgttgcaatgacgggtgaaattaccttacgtggtcaagtattgccaatcggtggattaaaagaaaagttacttgcggcacatcgtggcggaattaagacagttcttatccctgatgaaaataaacgtgatttagaagaaattcctgaaaacattgttgctgatctggatattcacccagtgaaaacaattgaggaagttttaacgttagccctagagaaatcgccatttggcatcgaagtagtgactaacaaataacactaaatcgtgatgtgaatcataatatttcactaaaaaaaaggctggataagcaataaaagcttgccagtctttttttgtgtcgttaatttaatggggtttattaattaatagtcctgttttatcagtcttgctatatataaaaaggcttgatataacgacgtttgcaaaatttgccattaatggtaaaaaataacgcataaattatggggatgaaaagcgtgaataaaactcaactgatcgacaaaattgctgcgaatgcagatatcactaaagcggcagcgggtcgtgttgtagatgcaatggtagcttcaatcactgaatctttacaaaaaggtgatgacgttgcattagtgggcttcggtacatttaccgtacgtgatcgcgcagcacgtactggccgtaatccacaaacaggtaaagagattcaaattgctgctgccaaagtgcctgcattccgtgcgggtaaaggtctaaaagacgcagtaaatcaataattgagtaaatcgtttttctgcctaatgtgttattgggttgacgttatggataaacagaaaacgaatcgattaagaaataaagcgcatctttaaaggatgcgcttttcttttttaccacagaaaaggggattaaaccgagtattctctggtgataagacgtgaaactaaagtagtcatttgatagaatagcgcgttgttctataactgaaatagacaacatgagagcatctcatggttagctaaagacttaactgaccaatgagtcaattagagctgtttattttgtatctgtaagatgtgtgttaagactcaaattttatacgggattggctatttctaaggattgtcgcgtgttgcgacattttgatattaagccagcgatgagcatgttaaattagctgtgctcaaaatagtcgtgtaacaccaataaaaaataattttttcaccaaacggagcctagtctcgttatgatggacaacattcgttcaactgctaataatccttttattaagatactattagctgtgatcatcctctctttcgtcctaactggtgtgggcggatatctctttagttctggtgttaatgatgccgctgaagttaacggttataaaataagtcgtgctcagttagagcaagcttatcaacaacgccgagcacaactacaaaaagatatgggtgacaattttgcttccctcgcatcatcagatgagggacaaaaaatgatccgccaacaagcattgaatgtgctgattaaccaagctttgctggatcaatttgctcaagagttaggtatttctgctggcgaccagcaaatcagagacgcgatttttgcgctaccttatttccaaactgatggtaaatttgataacaaaaaatacgttgagttattaacggcgaataatattgacgcggatgcctttgctgaaggaattcgtcaaaatctgattaatcaacaattacgttattctattcaaggcactgactttgctttagagagcgaagttaaagactttgccggcttaatgctacaaagccgtaatgtgcgtctcgcttcattagatattcagccattccttgaaaaagagacggtatcagatgaagaattaaaagccttttatgaccaaaatacctctatgtttatcgctccagcacaagttaaagtgagctatattcagttagaagcccaaaaagatttaagcaacatcactatttcagatgatgaagttaaagcttattacgatagtaatatcagtgaatttactgttcccggacaaaaaaaatacagtctacttgtcttagcagatgaaaccgctgcgaaagaagctgaagatgcgttgaaaaatggcgctgacttcgtcaccttagtaaaagaaaaatccattgatactttttctgctaaacaagatggttcattaggctggatcactattggtcaagagctaccagaattagcaaatgcgagtttgactgagaaggggcaaatttcacagccagttaaaatcagcaacggttatgctattttccgtcttgatgatattaaaccttcggtggtaaaaccttttgatgacattaaagctgacttattagtaaaaatgcgtgaaaacaaagccattgatgatttcttcgcattgcagcaaaaagtgagtcaagccgcttcaaatgataacgacacgctagcgacagcagcaaaagcagggaacgtcactgtaatcaatacagattggtttgatgaaaacaatgtaccagcagccttgaataacgaaaagttaacacagcttatctttggtggttcactggttgatgacaatggccctacaggcatgaactcagatatggttacccttggtaatgatagtgcttatattgttcgtgtcgaaggatataaacctgcatcaacccaaccattagataaagtacgtgacaaggttattacactggtcaaacagcaaaaagcttctcaagcgatgaatgcgcaagctcagaaactccttgcagccttaaaagaaggtaaaggagaggcggcattgaaagaagcaaatatctcgtttggtgaggtagaaagcgtggttcattcatcagccacagatccgatacaaagtgctatttttgctatgccaaaaccagcagaaggtaaaaaagagtacggtatgtctaatgtaccgggttcaaaagtggtcttaatccaattagatagtgtcactgatggtaagccaacggcagaacagcttgaatttatgactaatctctatcgcgcccaaatgggagaagaagctttacaacttatgctcagcgatttaagagaaaaagcaaaaatcgagatttttgataaagattatcaataaactatcttagattgattgaataaaaacccagtttcgactgggtttttttatggctaaaattatattcaagattagaaattgcgagcagtcacgtcattttttgtaacgctatttttttattcaatttatttttcttactctctcgtaattcatatggttgctaattgctgaattatttaaggcttggcattatttgatggcattcagtaatcgctgtttgctgttgaatatacagttatttttacaaaaaggagatgattaaaatggataaaaaaacactatcagcatttatggcatcaatatgtttaacattaggtttagggttatcaccactctcttatgccgatgatatatcgccttcaacatcaaccatgttgattgaaaaaggggatcaaaaagagagtgctgtcagtgaggtaaacgctagtgcacaaggaaagttggatattaatagtgcaacacttgatgaattaatgacgctaaaagggatcggaaaagcaaaagcgcaagccattatcgattatcgagaaaaagtggggcgttttgcttcttttgatgatctcgccaaggtctttggtattggtatgaagcttattgaacaaaataaagatctaattattatcaactaattactcgataatactgtaccccttttttgtgatcaaaaaggggtacagaattgcctttatataatattaataatcagatggtattttaatttgggtaataaataatcggatgaaatataccctatttgatatttttgactatatttaagatattacatagaaatttctcttagctaaagtttgttagggatatcaagaggtaataaagtcatatgagtacattaattaaagtttatggattccatttagatgtttttgagcatgtgaataatgcacgttaccttgaatttttagaacaagcgagatgggattggattgaacaacacttagatctcgcttggtttaaacggcatggtctagcactcgttgtcgcgaatattaatatcaactatcgtttgcctgctaatttaggcgatgaactaatcattagttgtgatattgcagaagtcggtattaaaagtggcgtgttgtctcaaaaaatagtgagaaaacaagatggtgcattgatttcagatgcattagtgacttttgtactcgttgatatcaatactaaaaaagcattaacacttacagatcagttacgagaaaaattggagtatgtacgccagtctgctgattagcattgatgttatccggtcaaccgtctaattttatcggtactcgtaacatattagcggcaggatataccgtgcttgcctgtggaaagggggagtagtcagcccactcgctgaagcaggaagccaccgaggtgagtcagacggtggtctgaacgctgtagggagccacgtcctttagggcatggaggaggtcaattggttttggtatagaataattccccgctctgttgttttcagggcggagaaaatcacaggggaaaactgggtaaaacaactggttaattagttatcacggcttcgacgactttattagcaacctaacaggccgcgaattaaaaataactgctacgggtgtaaacgcacagaaaacaaagctaacacatttttgacagattatttaaggccaactttatttttcatggcgtccatgacggcatttttgtcttgtaaatagccatgaagtccacgctctcttaaatggcaagcggcacattgaccacaaccatcaccttgaataccgttataacaagttaaggtgttgtggcgtacaaaatctaacttaccgtaatagtcagcgagtgcccaagtttgcgctttatctaaccacattaacggagtgataaactgaatatcacgagcaatacctaaatttaccgcatgatttagagctttaacaaactcatcgcgacaatctggataacctgagaaatcagtttcacatacgccagtaataacgctttcagcaccaatctgataagcataaatggcggctaatgtaagaaatagaatatttctaccaggtacaaaggtactaggaatatcgctttgttcactctgtttaaaatcaggcacaggaatattgtcacgtgttaagctgctgatagcgagttcattgagtaaactgacatccaaaactttatgtgcggttgcacctaataattgactgactctttgtgctacctcaatttcttctttatgacgttgtccataattaaatgtaatacaatgaacttcatcatactgctctagtgcttggattaggcaggttgtcgaatcttgtccaccactaaagacaacgaccgtttttttcatcagaatactcctgaatattgatattttttaaggattaatacgcataatattgcagatattatgacaagttatcaccaaattatcagtaagagattattcttatagcaggggtagataattactattttttgtaggggcatatgttaaaggagtatttatgttagataagattgaccgaaaactattaacgctattacaggaagattcaagcctctcactgaatactttggcagaggcggttaacctaacctcaacaccttgctggaaacgattgaaaagactcgaggatgaagggtatattcgtaaacgtgttgcattactcgacagcgaaaaaattgggcttggcttaacagttattgttatgataagaacacagcaacataatagcgagtggtatgaacaatttgtatcattcgttaagcaaatgccagaagtactgacattctatcgaatggcgggtgagtgtgattatctaatgcatgttgaagttgtagacatgaaaagttatgaccaattttacaaacgcatggttaacggcgttcctgggcttattgacgtaacttctaactttgcaatggaaaaaattaaatacacaacggcaatgccgatacctgaataagatccctctttaccaactggcacttttattttttgtacaaccttaggatttaaggcgtggctctattttcacagctcagttggtattttatcagcgaatggcgtcgttatgtcggtgctattttcttattgatggttatcgccgttctacaagtgatccctccgaaaatcgtcgggattattgttgatggtgttgatagccatagcctgtcttttcagcaaattatggggtggatcgggatcatggtattgatcgcccttgctgtctatttattacgttatatttggcgtctgtggttatttggtgcttcttaccaactggcggtgaaattacgtatgcaaatctatcgccaacttagtcttcaatcatcggctttttatcaacgctatcgcacgggtgatttaatcgcacgtaccactaatgatgttgataaagtcgtttttgccgcaggggaaggggtgttaacccttgttgactctatggtaatgggacttgcggtgttagtgatgatgagtattcagttaagttggcaattgacacttatctcattgttacctatgccattaatggcgatattaattaaacgctatggcgataaactacatcaccgctttaaaagtgcacaagcactattttcttcattgaataatcaagcgcaagaaagtttaagtagcattcgtatgatcaaatctttcggtcttgaacagcaacatgcttcacgttttgaaacggttgcaaaagagacgggtcgacaaaatatgcgagtggcaaaagtcgatgcattgtttgaccccacgatttttatggcaattggttttgctaacttacttgctgtggcgggaggaagttattttgttctcaatggcacgatgacattgggagaattaaccagttttgtaatgtatttagggcaaatgatttggcctatgttagcgctggcatggatgtttaatattgttgagcgtggtagtgcggcttatagcaggatcaatgcattactcaatgagcaaccggctatggttgatggtcaactatcactaatgcatcaaaaaggaactttagcggtagatattaaagcgtttcattaccccaaacagcaagttgatgtactaaaaaacattcattttacactctctcctggtgagatgttgggtatttgcggtatgactggggcggggaaaagcactttgttagcgctgatccagcgcttatatgatgtcagtgaaggggatattcgttttcaatctgtccccctttaccaattaaaattggatgaatggcggggaagacttgctgttgtcaaccaaacaccgtttcttttttcggatacgattgccggaaatatagccttaggacgccctgatgctaccaaagaagagatagaggcagtagccaaaatcgccaatattcacgatgatattttaaatttacccgaaggatatctgactcaagttggtgaaaaaggggtcatgctctcggggggacaaaagcaacgtatttccattgctagagctttactgttagatgcggaaatcttgttattagatgatgcgttatcagccgttgatggacaaactgaataccagatcttacaaaatctggctcaatggcgtaaagagaaaaccattattattagtgctcaccgtttatctgcactggttgatgcaacaaatatattggtattaaaacaaggcgaaatcatagagcaaggtactcatcaaacacttattgcagtgccaggttggtatcaagatatgtaccattatcaacaactcgaggccgcattagatgacgataaataataataaatccattaaaacgttattgccggccttaaaaagattattagcttatggcaaaacctatcgcaaaccgatgacattaggtgtggtgatgttatgggtggcagcgattgcagaagtgggtggacctttacttattagttattttattgatgctaaagtagcgactcatcaagttgaatggcgaggcgcattaggtcttgctgctgcttttattctattacaaattattgcggcactattgcactattaccaaacaatcgtctttaattatgccgctgttggggtggtacaacagttacgagcagatgtgatgagtgctgcgctaaaacagccattaagtgcatttgataatcagcctgtaggacagctgatttctcgtgttaccaatgatacagaaactatcaaagatctatttgttaacgtctttcctgctctatttcgtgctatagcattggtggttgtgatgttaatcgctatgtttctactcgaatggcaaatggcattagtggcgatgacgattttccctgcggttattggtgtgatgatgctttatcaacggctaagtacaccgattgtccgcaatgtgcgtcattatcttgccaatattaatgatggctttcatgaagtgattaatggtatgtcggttatccagcaatttcgtcaacaagctcgcttcggtaagaaaatgtcagatgatagctggcaacattatcaagcacgaatgaaagcactaaaacttgacgggttattattgcgcccgttactcagtatgctctctgcattggtgctatgtggcttattgatactgtttggatatcaaggtagtgctgtgattggtgttggagtaatttatgcttttatcagctatttaggtcgtcttaatgaacctcttattactctgacgtctcaacaatctttattacaacaagcggttgtttccggtgaacgagtctttgagttaatggacgccccgatgcagcaatatggcaatgcaagctataccattaaccaaggagatatagccattaacggcttgtggtttgcgtatctaaaacagcagtgggtattaaaagagattaatcttgatatacctgctcgccactttgtcgcttttgtggggcatactggcagtggaaaaagtaccttagccagtttgcttatgggaaattatccatggcagaaaggacatatctacttagataaccatccattagagtgctattcccatcaggcattaagaagcggtattgcgatggtacagcaagatcctgttttattatcaggtactttgcgtgacaatattactttagggcgtcactgctctgaagctcacttatggcaagtattagcaactgtacaattaaatagctgggtaaaaacattacctgatggtttagaaacccccttaggtgaacagggtagtcgcttatccgcgggacaaaaacagttattagcattagctcgagtattattatttccaccccgtattcttatcttagatgaggcaacggcaaatatcgactcgggtacagagcaagctgttcaaaaagcccttacggaaataagagaaaaaaccacattaattgttatcgctcatcgcctttcaaccattatcgatgctgacgaaattgtagtgcttcatcgtggtgagattgttgagcaaggtaaacatgcacaactattggcacaaaaaggtcgctattacaatatgtaccaattacaacaagttaaagagtcattacaagttcaagagccagccgttgttgagtgatattatctaaattccattcatcctaacccagccaatgctgggttttttattgcctcactttttgccccaatttttagcattgtggacatgataagagcatttattgcactaagttagtgagtgatatttattttttatttatttatcaatgaaataagtattggcatatctcttgctctatcagtatggcgctttctaaaaccgtatggagcaattatatgaaatatatcatcgcgattattaaaccatttaaattagaagatgtaagagagtcactctctgagcttgggattaatggaatgacaatcagtgaagtaaaaggatatgggcgacaaaaaggacatgccgagctttatcggggagctgagtatgaggttaactttcttcctaaagtaaaaatagaattagcggtttgtgatgggcaattagagcctgtgctacaagccataagccaagttactgatactggtaaagtaggagatggcaaaatttttgttttagagttattgcaggcgatccgtattcgtacaggagagtctggtgaagaagccttgtagaggagctaacaaatgaaacgatttattagttatttttttacgttagcacttacatactttttattacctcagttagctattggagccaccacaatagacatagataaagcggacaacagttttatgctgatctgtagtgcattggtgttttttatgactattcccggtatcgcactcttttatggcgggttactacgcagtaagaatgtattatcactaatgacgcaagtgatgttgattttcagtgtagtgattatcctttggattatgtttggctatagtttggcgtttactgctggaaataagatttggggtgggtggtcacttacttttctcaataatatttcagtcgattctgttgctggtgaaattaatcaatatgtgcatgttgtatttcaaggctcttttgcggtgatcaccgtggccctgattgttggcgcattaggtgaacgtattcgtttttcagcactgcttatctttactgttatttggtttactttttcatatattcccattgcccatatggtatggggagaaggtggttggcttatcgatgatggagcattagattttgcgggagggacggttgtccatattaatgccgctgtagcagcgcttgttggtgcttacttactaggtaaacgaggtgattatcaacatactgcgattaaaccacataatttacctatggtctttactggtacagcggtactttatattggttggtttggttttaatgcaggctctgcagggagcgctaatggtattgctgcattggcgtttttaaatacagttgtagctaccgcaggtgcagttcttgcgtggacatttgctgaatggctagtgagaaggaaaccttctatgttaggtagttgttcaggatgtattgcgggattagttgctattaccccagccgcgggaaccgtaggccctattggtgctttggttattggtattattgctggcatcatcgggctttggggggttgtggttcttaaacgttggttaaaagcagatgatgtctgtgatgtttttggtattcatggtacttgtggtattgcgggctgtttattaacgggcatatttacggcttcatttttagggggcattggttatagcgagcatatgacgttaggtaagcaagtgctaactcaattatttagtgttgtgattacgcttatttggtcaagtgttgtggcttacattgcctttaaaatcgccgataagctagtgggattgcgtgtctcacaagaagaagagcatgatggattagatataaccactcatggagaaagagcgtacgagcagtaatggtctattccccctcaactgaggggggaatattctcactgcgttatttgtttgattttattcgtttttggcggataacaccttcttgaacagaagaggcaactagttgcccactcatattaaacatttttcctctcacaaatccgcgaccacctgaggctgatggactttcaatagcataaagtaaccagtcatcaacacgaaatgggcgatggaaccacatggaatgatcgatggtagccacttgtaaactcggatccataaaacctaaaccataaggttgcagtgaggtgggtaaaaaatcaaaatcagagatataacctaataagtattggtgtaggaaaggatcagatggcatttctccgcgactacgataccaaacataacgttccgcaggtgctttctcataaccaaacgggctaaaatattgcacggggcgtgcttcaaaaggtgtttctcttaatgcgagtgttcttagaggttcgggtaattttggggcaagttttttcaatatctcatcttgagagatcaagtcatttggaaaagggacttcaggcatcatatcttgatgttcaaagccttcttcaaactcttggaaagagacggtcatataaaaaataggcttaccttgttgaatagcactgacgcgacgagtactaaatgagccaccatcacggatagattccacatcgtaaacaataggcttatggctatcaccaggtcgtaaaaaatagctgtgaaatgaattaacatagcgattatcagcaattgtttgttttgccgcataaagagcttggccaacaacttgtccaccaaagacttgtggtaaacctaaatcttcactttgacctctaaataggccttcttctattttttcaagctccattaagttgataagtttttttaatgcctggctcatagtttacctatatatcatcggatagattatgttttatagttttgattatatacaatccgctatcggataaaaaaataatctgctgtttatattttgctaaaaatgccgtaacaccttatttgataggggagcaatcgcgatattagctaaatagagggcataaattgaaagaatttggcaaagcataaggccttattgagtaatttatcagcacttggtctggctttccttgctatttggatagctttaaaagataatgcatatcgtcttagcaataagacaatctatgggggcttgttggttctcccgcaacactaacttgttaactcggtcaggtccggaaggaagcagccatggcaggtgtcgtgtgtgccgggatgtcgctggcaaggccccacccaatttctgcattgcaatcccgctattttttatccagttactttcttcatcgtaatcgtatcgttgaacgtttgcatctaaacatatttctatttacatattgtttaattaatagtttttttaactatatttactctcaatatgggtttggtgaattaataagaaacagaatacctttcacctattatcgccttcgcgttatagatgaataataagagaagttgtaagaattatgccgtcatgccgttataagcacggcatgatagtgtgtaatcattttacttattaaaaaagcatgaataaaacgatacctaaaaataagaactattaacccaattactataaagagatagtaaaaataagaggatactaatggttacttgctaatacgattatcttacaaatttccaaacagatgctgggatcttgtcataaagtttgttcatggttagctctgctaaacgatggtctgcagctgaataaaatagctctaactcatcatcggtcagttcatatttgttcttttcaatcactctttcaagggtttcgattgaggtgcattttcttaaacgcattagatagtctgttttagtcatgttgtcttttctctataatttaaataaaactaaaggtaatttaatttacttgatataacttttaggatttttatcgataagcgttaacagtgaatagtttaactctttccaattattcaattccgagtaggaaatggagtcactaccgaataaccgataagtctcttctatgcactcttccattaaagtgttaatagcgtgtttatcaggatattttatcttaaacagccaactaaagcccataatgtgatcaattagggcattaaggtcaacgctttttgtgctacttagatcattgttccaaactgcggtacctttatctaatgagcttaatgcttgctgtaatagctcttcacataaaaatgacaattcagctaaatctattttttctggtgaatattcgtccatagcttattgtgactgaattatgctaaagaaacactaataattaatactgataaattagctattaatgaagcttgcggcttaattcagtaatgaattaattaaacaatcttaaaataaacagcaactttatattttattcatataccaataatgtttaataattgtttttattatttctacatagtaatggtgtaatttgaaaaaggtatttaaatacgaaactacattcaatgcaagttgaaaaagtgtacaaaataaaagtactgtacgcttaatatagcactattattgcataagtcactatctgagcgatagaaatttgtctattttcgtaaaaatttagttgagaagcgtaaaagtaaggataattaacttgatgattatcctagtatttgtttgctaaaaatgtcttatatcgctaaatagtcttggtgataagctgatattaataaaaaatagtgcgttaaatttgacaaaaagtcatatataagaaaaaaattaaactgatttattgattagggatatgtttttctttaattgataacaatataaaggggcgggattaacacgaaaaattaaaataaaacaaaaaggccgctaagcgacctttttgatgggtagccaacaaattatgttggctgtggtatagcataatgattacttagtttggtgcggatagtttgggtgctctaagtcttcgtttttcttcgcaaaccttctgcggatcacaacgaagaaaataggaacaaagtaaatagcaagggatgtcgcggcaatcataccaccgaatacccctgtacctactgagttttgcgcaccggagcctgcaccgttacttaataccagaggaataaccccaagcataaaggctaacgatgtcattagaattggacgtagacgcattctaacggagtctaacgtcgcttctactagccctttaccctctttttccattaagtctttggcgaattcgacaatcaatatggcgttcttcgccgataacccaatggtggtaagtagcccaaccttaaagtaaacgtcgttttcaagccctctcaatgtagtaaatgctaatgcaccaatgacccctaaaggtacgactaacataactgagaaaggcactgaccaactctcatagagtgccgccaaacaaaggaatactacaattaatgaaatagtatacagtgctggcgcttggttacctgatagacgttcttggtatgacatacccgtccactcgtagccaataccacttggtaatttgctggcgagttgttccatcattagcattgcatcaccactactttgtcctggtgttgcactaccttggatctggacagctggtaaaccattataacgctctaaacgtggtgagccatataaccaaggatctttactagtatcaatgaaggatgagaaaggcaccatctgacccgcattgttacgaacataaagattagcaatatcttgtggcaacatgcggaattgtgattctgcttgaacgtaaactttcttcacacgaccacggtcgataaagtcgttaacgtagctaccaccaaacatcgtacctaatgttgagtagatatcactgaccgcaacaccttgagcttgtgctttttctaagtcgatataaagacgatactgagaggtatcttcttgaccgttaggacgcacacccgtcaacatttgtggctcttgtgctgccattccaagcaattggtttcttgcttccatgagtttttcgtgtcccaggttggcattatcgattaactcgaattcaaaaccacctgcagagcctaactcaacaatcgctggaatattaaaggagtaaacaaaggcttctttaatttgagaaagagcttggttagcacgaccgacaatagcagggactttgtcttggtctgatttacgctcatcccaatcatttaatacgacgaaagcaagccccatgttttgaccttgaccaccaaaaccaaagccgctgacggtaaagaccgacttaaccacatctttttctttagtattaaagtagtcattgacttgtgctaatacgtcttgagtttgctcttgggttgatccagcgggcaactgaaccattgtcagtaataccccttggtcttcttctggtaagaaagacgccggtaaacgcacaaacataattgccatagcagcaacaagtaagacgtagatcagtaagtaacgacctgtaccacgcagtgtacgagaaacactgtctgtatagtggtgactacttttttcaaaaacgcggttaaaccaaccaaagaaacctgtttgtacaccatggctgcctttcgggattggttttaacaatgttgcacaaagtgcaggggttaaaatcaatgccacgaaaacagacagcaccatcgctgatacaatagtaactgagaactgtcggtaaatcgcacccgttgaaccaccaaagaatgccattggaataaataccgcagataacacgagggcaatacccaccaatgcaccttggatttgtcccatagacttacgtgtcgcttctttaggtgacagtccttcctcttgcatcacacgttcaacgttttctactacaacgatagcatcatcaaccagtagaccgatggctagtaccatcgcgaacatcgtcaaggtgtttatcgaatagccaaacgcggacaatatggcgaaagtccctaataatacgacgggcacagcaatggttgggattaatgtagcacggaagttctgtaagaacagatacatgactacaaacaccagcataatggcttcaacgagcgttttaaccacttcaaaaatagagatcttaacaaatggtgttgtatcgtaaggataaacgacctctaatccagaagggaagaatggctccatatcagcaagtgccgcacgtactgctgttgcggtatcaagggcgttagcacctgttgccagtttaataccaatacctgctgcaggtaagccattaaagcgagcaatcgtgctgtagttttcagcccccatctcaacaatacccagatcttttagcttaacctgtgaaccgtcttgattgactttcatcagaatatcagcaaattgctcaggtgtattaagtcgagtttgcgcaatgatagatacatttaaacgctgaccaggcactggtggcgtaccacctaattgacctgccgccacttggttattttgcgatttaatcgcattaataacatcaagtgtggtcatgttatatttcaccagtttatctggatctaaccaaatacgcatcgcgtattgtgtaccaaataactgagtttcacccacccctgtgacacggcttaatggatctttaattgttgcacctacatagtcggcgatgtcatcttgtgacattgagccatcaccagagataaaacctgcaaccattaagaatgaactagaagatttatcgacactaatcccttgttgttgtacttcctgaggtaaaagaggcattgccaattgcaatttattttgcacttggacttgcgcaatatcagggtcagtaccagcttcaaaggtcagcgtgatattcatcatacctgcagaatcactggttgaagacatataaaccatgttatcgataccattcatattctgttcgataacttgggttacagtattctgtaccgtggttgcatcagctcctggatagaccgcagagatggaaatcgctggcggtgcaatcgttggatattgtgcaacaggcagtttgatgagtgccaaaagaccagcaagcatggtaattatggcaattacccacgcaaatattggtctgtctataaaaaacttaggcatagatcatcgactccttattgaggatccttcgctggttcagatttttcagttgatgctgttgcatctaaattttcttcttgtggcgtaaccttcatttcaggttttgctttttgtagccccgaaacgataacgcggtcaccaacctgaacaccactattcactagccacttattaccaactgcttgtgatacttcaatagtacgcacttcaaccacgttgtctttattaacgaccatggttgttgcttcaccacgaggagtacgaataacagcttgttgtgggatcaaaatagcattttgacgaataccattttctaattttgtacgaacaaacataccaggcagtaattcaccatttggattaggtacgattgcacgcatagtgatagagcctgtggattcatcaacggtcacatcagaaaattctaaatgacctttttgagcgtaggattgaccattggttaaggttaagtgaacaacaggtttaccttgctcttgacgaacaatgccactttcaatttcattttttaatttcagataatcttcactcgattgtgtcacatcgacataaatcggatcgatttgctgaacggttgttaaagccacttgctgaccaggtgcaactaatgcgccttctgttaccgttgatttacctgaacggccagaaattggtgcggtgactttggtatattcaagattaatttttgcattagtcactgtagcttcagctgcttttactgcagcaacagcttgagcgtactgagatgttgcggtatcaaaatcttgtttactgacataattggtgccgagtagaggtttatagcgctctacagttaggcgagcaatttcagcattcgcttttgcttttgctaaatcagcttgagcactgtttaatgtagcttgaaaaatagcaggatcgatttggtacaaagatgttcctgcttctacataactaccttcggtgtaattgcgttttaagatgatgccgccaacctgagggcgaacctctgcgatacgataagcagatgtacgaccaggtaagtctgttgtgatagtcagtggtttcgcatctaatgtaacaacacctacagcaggagcaggaggtggacctccagcagactgatttttgtcgccacatccagcaataaccaagctgcctgaaagcactaacagagccagaggcaaaacccctctgttttttcgcataagaaaacctctattcaaaagttgtttcccgggataaaaaataattaagttgatgaatgattgcgatgtatagtacaaacatacatgaatgtatgtaaattaacttcagtcaaaatcgaggaataatggcacgaaaaactaaacgccaagcacaagagacaagacagcagattattgatgctgcacttaggctatttactgtgcaaggtgtttctgccacatcactttcagatattgcaaccgaggccggagtaactcgaggtgcaatatattggcactttaagaataaagtggatttatttactgaagcgtgtgaactcaccgacttaaaaatagaatcattagaattagagtatcaatcaaaatatccagatgatccactatttgtattaagagaattgcttatttacatattgacatcaattgtcgaagatccgaaacataatgcacttctagaaatatatttccataagtgcgaatttgttggtgaaatgacaccaattgttgaaatccgccgagaattatgtgcagccgattactctagaatagagcaatctttatctcgctgtatcgaaaaaaaacaactcccagccaaccttgatttaagaagagctgcgattatgttaagagctatgatgacagggcttgctgaaaattggttattttcaccagaaagtttttctattaaagaggaaagtcaatatttggttgatagttttattgatatgattaagcatagcgtaaatatgagaatatcggcgctatcttaatttattcttaaacataaggaagaagttcatgagcaaagtattagtgattgcaaatggtgcagcatacggtaatgaatcattatttaacgcactgcgtttatctattactttaaaagagcaacatccagaaacgcaattaaatatctttttaatgtctgatgcggtaaccggtgcactggctcatcagcaacccaaagaaggttacaacctccaacaaatgttagaaattttaacggcacaaaacgtccctgttaagttatgcaaaacctgtacagatactcgtggtatcagtgaattacctttagtggatggtgctgaacttgggacattggtggacttagcacaatggactctcgacgcggataagattttgactttctgatcaatattctgttttctcaggggagaaacatctaggcgacttgttctaatgacactgccaatttcaagtaattggattatactaagaggcagtttttcaatattcattgaacaagttgctcaatatgcgtggatctaacgtttttattcgattaaatcattttatttcgacaatatttattgtctctatcctctttgttttgttaggaaatatactttttaccccggctaaagcagaaacagtcagcaataatttacccaccaaagaaagtattcaaaaccagcttaatttattaaataaacgtagtgacttaagtgccgaagataaactcactattggtgatctagagcaggcattgctacttcttgataatattcaacaactagagaaaaaagcagacgactataataagacagtagagcaattaccagaaaagctacgcagtattcaaaatcaattaagtcaattaaaacagaaaatagcaaacaaagaagttgatgactaccgtcaatctttagagagtctaccgcttgcaactttagagtcgcaattagaagaggttttacaatccttagcgaaagcacaggaagatttagccaattacagtaatgagcttattgttttacaaacgcaaccagaaagggcgcaatctgttttatttaataactcagaaagattgcaacaaatacgaattgcattaaataaaagcagtgcagataaagctcaaatgcgatcttcttctgtgcaacttttacaattagaacaatattatttgcaacaacaaaacagttttcaaaaacgaacactgcaatctaatgtacagctacaaagcttattacaattacagcgtgattatagttcagcctatattgacctctctcaagagcatgctcaactactgcaagagatcttaagtgataaacgtttagacagttcagaagaggttgccaaagaggcgcagacggcagagctgagtaatcaggcgattaaaaataacgctttttatttagctcaagctgatattaataaaaaactcagcgataagctgattattactacacaaaataataatgagttaaatcgccatagtttaatggtcaaaaaccgcctagatagagctatccaatcagagcgcaatcttaaagagcaaattgatgtattgaaagggagtctgttgctctctcgtattctatttgaagagcaaattgagctacctgatgatatctttatcaataagttaccggataaaattgctgacttacgtttagaacagtttgaaatcaataaacaaagagatcagatttttcagccgaatctctatatcgaccaattaatgcaagagtaccaagccgcacatccggaaattactgataaaaatgagctaaaagagctacataatgcattattacaactgattgatgcgcgacgagatctactggataagctcaataatcaactgggtagccaaatttctgaatctattaatttacagatggatcagcaacagctacgtagtgtggtgagttcattagaaaacaccttagcgcaacaaatattctgggtaagcagtaataaaccgattaacctcagttggttctcaacctttccagatcaggcagtggctgaatttcaaagttttaaactcaactggtcaaatgaaaatctgttgaccggggctaaaaaatcatatcctgtgctgattgcgctagttttgttcagtagcatactgatttggcaacgtaaaaaatttgataagcagtttgataaattaagtgctgatattaataagcttaataaagatacgcagttacatactccattggctttagggattgttttcttaaaaacattacccctttcttgtattgtgttagcgataggatattggctaattaatagctttaatgtgcaacaagagtttatctggtcttttacttggcagtttgcggtattttggctgatgtttgagtggtcttatcgtttaatgtcggataatggagtggccgttaatcactttaagatccccctagagcgagtacaacaaaatcgtaaacgtttattacgtttatcgcttcccatgttgcccattattttactttccgcttatggtattaataacccattattgttagtgggtgatgtgattggtcaattagtgacaattatttcactcttttttattagtctgtgtgcattacctttttgtcgtgaaatgtggcaagaaaagggtaatcatgttgtgagaacggtggttatcaccttattaactttctcgcctttacttttaatggggttagttatttttggttattattacactgcactacgtttagccaatcgttggattgatagtttatatctacttatgttgtggtttattgcttaccacgcgagtttacgcggccttactgttgctgcaagacgactggcgtatcgtcgagcgctagagcgccgacaagcgatgcttaaagagaaaaaagagggggacgataacactctcgagccaatccaagagccaccgatggatatggagcagataaaccaacaatcattaagattaaccacaatgatcttatttattatctttgcttccagtttttatggtatttggtctgactttattacaatttttacttacttagatggtattacgctttggcattataatttgcctacagagttaggtaatgtggttaaagcagtgacggttgctgacttactcctctcttttgccattatggctatctcttggtttatgataagaaacctaccgggtttactcgaagttcttattctttcaagaattaaattacagcaaggcgcttcttatgccattacgactattctgacctatattattattgcgataggtacaattgtttcgctggggatattaggcgtagcatgggaaaaactacaatggttggcggcagccttaacggttggtttagggtttggtttacaagaaatattcgctaactttgtttcagggataattatcttatttgaaagaccggtcagaattggtgatacggtgacaattggctcttattctggaacagtgagtcgtattcgtatccgagcaaccacggtaacggactttgatcgcaaagaggttattatcccgaataaagcctttgtgactgaacgactgatcaactggacattatctgatactgtcacacgtattatcattcaagtcggtgttgcttatggttctgatctggataaagtgaaaaccattttaatgaaagcagcaaaagataatcccaaagtgatgactgagccagagcctgtggtgctgtttaccgaatttggggctagcacgttaaatcatgaattacgtttttatgttagaacgcttggggatagaaatactgctatcgacgaagtcaaccgcgctattgataaactttgcaatgaaaatgatatcaatatcgcgtttaaccaattagaagtgtatctgcataataaacaaggagaagaagtgcaagaaataaaaaaaggccctcttgatggttcaacacctgaagcgaatacgccatttaattaaatagtaagatgtttagttagcggtttgattatctcgttttttctcataatcaactcgcacaatttccagtgcctcaagtacggtgttgggatcaatatgattggtttcaaataagtaaatcaaatcaaccgctaactgaactgatttaggggcatcttttaattccattatggctccgattaatatttatcttcttgtcgttcaatactcttttctatagaaactagggcacttttacaacgcgctaggcgattttcaagagcagcaatctctttttgtaattcttgttggcgtacaaagccttgtgcttgagttaaagcaagctctctatcttggatcatcgactgtaatcggcgctcgtaatcctgatgttgggcaagtttttggtataaatcgacactttttttgcgttgacttagctggttttcttgctttcttagtgtttgtgtcgataattcacgagttaatgcttcaatttgttgtaggatttgtgttgccagaaacttaacttgctggctacgttgtgcctcaacacaagttattaactgagtaaaattatcgcggatctgttgcatataaccaccaagagaatcactgcggtggtgaaatagtgctgtgtcgaagcaaggtgctgcaatttttttgtttgcaattggcgctaaggtttcggcgagattgtcgatctgttttttaaacaaactcaatggatctgtttttttcatttgggctttgtacctgttttgctaaaaacatgaattgacttaaagcaacaaaaaagagttgttcactggctttctgttgcattttaacggcatattgcatagattctatcgtttcgttttttattatggcactgattatgactgctaacgcgcaacaactgcaatttattaaagacagcattgaaaccattcctgattaccctaaagaagggatcttattccgtgatattacgacattactggataatcccgcggcatatcaggcaacgattgatttattagttgagcactatcaaggtcagggtatcactaaagttgtaggtaccgaagcccgcgggttcttatttggtgccccagttgctttacgtttaggtgtgggttttgtgccagtgcgtaaaaaaggtaaattgcctcgtgagacgcttagtgaaacttatgatctagagtacggtacagatacattagagatccataaagacagcattacggataaagataaagtattaatggttgatgacttattagcaactggtggtactatcgaagcgactgctcgtcttattcgtcgtttaggtggaactgtaacagaagctgcatttattatctgtttacctgatttaggcggtattgagcgtctagaaaaagaagggatccatagcttcacattagttaatttcccagggcattaatgcttttttagtgtcaatcagatgcttaatgcatttgctggtaaatacctatcatcgtgcgggtgtatcaaaatgtatgacccaatacattgggcccgcacaatagtcaccgctttaaagtgtgcggataatttcatcaatatctcatttgtttcctacagatctcgctcaataggctatccctgtgttagcatagagataaatcttgttcatatttagcggaatcaatgagctatcaggtacttgcccgaaagtggcgcccacaaacttttaacgatgttgtcggtcaacgtcatgttttgaccgcattggctaatggtcttgatcaccaaaggttacatcatgcttatcttttttctggcactcgcggtgttggaaaaacgacgatcgcccgtctatttgctaaagggctgaattgcgaaacaggcataaccagtaaaccttgtggtaaatgtgctaattgccttgagatagagcaagggcgttttgttgatttaatagaaatcgatgcggcatcaagaacgaaagttgaagatacacgagagctactcgataatgttcaatatgcgccggctcgtggtcgttttaaagtctatcttattgacgaagtgcatatgctttctcgtcatagttttaatgcgttacttaaaacgttagaagagccacctgaacacgttaaattcctgttggctaccacagatcctcaaaaactacctgttactatcttatctcgttgtttgcaatttcacctgcgggcacttgatgttgaccaaatagcgacacagcttgagaaagtactatccgcagaacacattgaaaatgatgtgcgagcacgccaattaattgcccgtgcagcagatggaagtatgcgtgacgcattaagcctaaccgaccaagcaattgcgagtggcgaaggtattgtaagtacagaagtcgttagtcgtatgctaggcacgattgatgatgcacaaccattagcactgattgaagctttagtaaaagcagatggccaacaagtgatgtcgttggttaatgaggttgctttaagaggaacggattgggaaaactttttagtcgaaacgctctcattattacatcaaattgcgatgttacaacttttgccgagtgaaaataatccccaagagcaatttacacaagagcgtttacgtttattagccaaatcagtgtcgccacaagatttacaactttattatcaaactttattagttgggcgaaaagagctggcttatgcgccagacagacgtatgggtgtagaaatgacccttctcagggcgcttgcttttcatcctaaaactgtcattgatgaaatccctacggctcctttagcgcaaacattgcctttagcatcacagccgaatcaacagcgagttgaaacatcggcgcctcaagtgagaagcaatatggcaacggcgacacccaaagtatcaccgtcgccagaaaacagtgctgcattaggaaatagccctgcggcacaactgttaagagcacggcaagccataaggggagctgagcaagaaacgccaccaaaaaagcctcaaccggcgacgcctaaacaggctaagccggctgctagtgcattagagcggctagcagccgtcagtgaaaaacgccagcaaagggttaatgaaaaacggtcatctgttgcagtcgagaaaaagaaaaaagaagcttatcaatggaagccacaaaatccacaggcacaagtaacagagcccgtggtctcttcaccgaaagagatcaaagaagttcttgagtatgaaaaaacgcctgaattagccgctaaaattgcgcaagagtcgcaacagcgggacgagtgggcggcggaaatagctaaaatgccattgccgaagttagtgcagcagttagcgttaaatgcctataaagagacggtcggtgaagaaacgatcattttgcatttacgcagtaagcagaaacatttaaattcagcaaatgcactacgaacactgacaaatgcgctaagtgaattgcatggaaaagcaatttcactcacaattatagaagatgataatctaacggttaaaacgccgttagaatggcgacaagccatttatgaagagaagttggcgttagcgcgtcaatcgattactacggataaaaccattcagacattacagcactattttgatgctgaattggatgaagagagtatccggcctgtttaatcgcaacatgttgtatatttctatacagcgtagcttttacaaagagagacaattatgttcggaaaaggtggtttgggcaatctgatgaaacaggcccaacagatgcaagaaaaaatgcagcaaatgcaagaagagatcgctaacttagaagtcaccggtgaatctggtgctggcttagtgaagatcactatcaatggtgctcataattgccgtcgtgttgaaatagatcctagtctgctagaagatgacaaagagatgttagaagatctgattgctgccgcctttaatgatgctgcacgtcgcattgaagagacacaaaaagagaagatggcatcagtctctaatggtatgcaattgccaccaggctttaagatgccattctaatgcaaactagccctcttcttgaatcattaatggaagcgttgcgttgtttacccggcgtcgggccaaaatcagcgcaacgaatggcttttcatctgcttcaacgtgatagaagcggaggaatgcgacttgcacaagcattaacgcgtgcaatgtctgaaattggtcactgttgtgattgtcgaacatttactgaagaagagcgttgtacgatctgtgctaatgctcgacgtcagcaaaatggtcagatatgcgtagtggaaagcccggcagatattcatgctatcgagcagacagggcagtttgcaggtcgatactttgtgttaatgggacatctatctccgctagatggcattggtcccatggatattggcttagatagacttgaagagcgtctaagccaagagcctatatcagaagtgattttagccaccaatcctacggtggaaggtgaagctacagcaaactatattgctgagatatgcgctcaatatgatattgctgctagcagaatagcacatggcgtgcctgttggtggtgaattagaaatggtggatggtaccacgttgtcacactctatcgcgggacgccagaagatccactattaatacacaaaagatttaataaaaaagcaccttgttatcaatataatgaggtgctttttttttgattttactgtcaccttgactgatattgttaatattgcctcaattatattaataatgactatttgttgcttatttgtgatctaaatctcccttttttgtataataaaaaagattttttatgtaattaatagttttctaacttattgatagtcataaatttgttatctcgatcacaaaaaaaataccttttaacatcagtaaaaccactcaactgagaaaatagaccgcttaactcactatataaccgtttagcgatttaataacactattcatcagacattcttcatatgatgtcactgcgggtcattattttcatattcgctcaaattattatcaattgtcccgtactactctttggctgttcggtcttgcctgaaaaaaaggtgtctcatgaacaaaaatacatttcttaagcacataccttgggtgatcctcgggattattggtgctttttgtctgtcagtggttgcactacgccgtggtgaacacgtcagtgcattatggatagttgttgcttctgttgcggtctacttagtcgcttatcgttattacagtctttatattgctcaaaaagtaatgaagctcgatcctactcgagccactccttcagtaattaataatgatggtttgaactatgttccaactaatcgttatgtcctctttggtcaccactttgccgctattgcgggtgctggaccacttgtcgggccagtattggctgcccaaatgggttatttacccggtacactgtggttattagctggggtggtacttgctggagccgtacaagactttatggtgctgtttatttcgacgcgccgtaatggtaactctctcggtgagatgataaagaaagagatggggcctgtaccgggaactatcgcgctgttcggctgtttccttatcatgatcatcattcttgcggtgctagctctgattgtagtgaaagcattagcagaaagtccttggggagtcttcaccgtctgttcaacagtacctattgccctatttatggggatctatatgcgctatattcgcccaggtcgtgtgggtgaagtttctgttattggtattgttttactgattgccgctatttggtttggtggcgttatcgcgagtgatccttactggggacctgcattaacctttaaagacaccactattacttttgggttgattggttatgcgtttatctctgctttactgccagtatggctgattttagcccctcgtgattatttagcgactttcctaaaaattggtgtaattgttggtttagctatcgggattgttattctaaatcctgagttaaaaatgccagcgatgacccaatatattgatggtacaggaccattatggaaaggggctctattcccattcttatttattactattgcttgtggtgcagtttctggtttccacgcactgattgcatcaggtacaacgcctaaattgatcgccaatgaaatggatgcgcgttttatcggttatggcgcaatgttaatggaatcatttgttgcgatcatggcattagtggctgcctctattattgaaccgggtctctattttgcgatgaatacaccgcctgccggattaggcattacaatgccaaatctgcatgagttagggggtgaaaacaccgcaatgattatggatcaattaaaagatgtcaccgtacacgcggctgcgacagttagctcatggggctttgttatctcacctgatgagattttacaaactgccaaagatataggtgagccttctgtacttaatcgtgctggtggtgcacctacattagcggtgggtattgctatggtgttccataaaattttacctgcggcagatatgggcttctggtatcactttgggatcttatttgaagcactctttattttaacagcattagatgcaggaactcgttctggtcgttttatgctgcaagacttgttaggtaattttatcccatacttgaagaaaacagactcttttattgctggtgttatcggtacagcaggttgtgtcggtttatggggttatctattgtaccaaggtgttgttgacccactgggtggtgttaagagcttatggccactgtttgggatctccaatcagatgttagcggctgttgcacttgttttaggtacggtcatcttaatcaagatgaagagaacgaaatacatctgggtaaccgttattcctgcagtatggttattaatttgtacaacatgggcgctaggattaaaactgctcagtaatgatccgcaaatggaaggtttcttctatcttgctaatgagtacaaagcgaaaatcttagccggtggggcagatcttactgccgcagaaatcaccaatatgaaccacattgtgattaataactacaccaatgcaggtttaagtattctgttcttagtggttgtttacagcattattttctacggtatccgtaccgcaatgaaagcacgtaaaaatccgaaagagtcagcacaagaaacaccatatgtacctatgccaaaagatgtgaagatatcttcaggtcattaatcttaggcgaataggctaaaaacccccgcactcacttaatgagtgcggggcttaggagaaacttatgtttggtaatttagggcaagctggaaaatatctaggacaagccgctcgtatgttaataggtattcctgattatgataactatgtgcagcacatgaaggacaaccatcctgataaaccagtgatgacctataacgagtttttccgtgaacgtcaggaagcccgttatggtggcggtgatggtaaaggtggtttccgctgttgctaataatctgtaaaggagacaaataatggaacctattgcagtaacaatattgactggctttttaggatcgggaaaaacaacgcttttacgccatatgctcaatgaggagcatggctataaaattgcggtgattgaaaatgaatttggtgaagtgcctatcgatgatgaaattattggtgatagagcaacacaaataaaaacactcaccaatggctgtatttgttgtagtaaatcgaatgagcttgaagatactttgctcgatctctgcgatagtcttgatcgtggtgacattgtgtttgatcgcctagtgattgagtgtacagggatggctgatccggggcctatcacacaaacatttttttctcatgaagtgatctgccaacgctatttattagatggcattattacactggttgatacaatccatgctcagcaacagttagatcaatttgctattgcacaatctcaaattggttatgcggatcgcattctattaactaaaacagatattcaacctgcgagccaacaattacttgctcgtttaagacgtattaatgctagagcgcctacctatacggtgatcaatgggcaaatagatttagcactattatttaacgtaaaaggctttatgttgaatgatactttagaggtcaagcaacccctgtttcgttttcagccagaaaaacaagatgatattcagtctattgtactaaattttgattatcccgttgagttacaagcagtctctgatgttatggagtctttgttattgagctttgccgataacttattacgttataaagggatcttaaatattaaagatagtcctaaccggttgttattccaaggagtgcaacgattatatagcgctgattgggatagaccttggcaagagaatgaaactcgtcaaagcaccttagtctttattggtattcatctgccagaagaagaaataaaagccagtttcgatgcgttaatgcataacactaaagaatatgagtaatagcgattgtttgagaaaagtgtttgttggtagtgatgtaatagcagtaagcagtaaatagcagtaacgaatattaatcatgctcctggacttgaggaggatcctgttcctaggatcttatgtttcaccccataataaccattatggggtgttttttttatactaattagccgttagcaacagctttatattccataatttcaataatttgtacatcagtatgttgcattgctcgactagctaatgcacaaagattctcgattgtcatatcaacatcatgagtgacaatgccgtcattacccgtcacgcaggtatcatctagcgccattaataccgctttataagcggcacttgctcctgtcgacactttcatcgcacaactgttagaggcgccatcacaaatcacgccactaatatcgccaatcatactactaattgccattgccatgggttcatagcgttcttccattagccacgcaatagcaccagcagctcccattgatgcggttgttgcggcacatagtgcggaaagtgccgggaatttatggtgaatataaatggctaataaatgtgaaagcattaatgctcttgccattttttcttcactaacctgtaaatattcagcaaccaccacaacaggcattgtagctgcaataccttgatttcctgaacctgagttactcatggcggggagtacggcaccgcccatacgtgcatcagaagccgctgaagtgcggatcataatttcagaaagcagatctttagctaacaagccacgttgttgctggcgttgtaaggtttgaccaatatgcaaaccgtaagtattgttcaagccttcttttgataatgcgtcatttaattgcgccgattgcaaaataaaagaaatttcttctacaggagcttgagtaataaactgatagatttctcgtgtgttagtgttggttaaggcttgcttaatttggcaaggtaaggccgtttgttcagattgtgatgataatttatcaagcaccacctgaccattatggataattttaacaatattagtatgatcacctgcaataatgacggtggcactgttttcaccatcttcaacggtaacctcagagtaaagcacctcttggcaggctttttttattgatacgcagactatgcctgaatttaatagatttttactcaactcaacttgttctggtgtggcattttttaatacttctagacctgcttcactatctccagcaacagcccctaaactagccgcaatggataatcccaccatacccgtgcccggtacagtcactcccattccgtttttcattaagttaggagaaacctctgcgctaatacgggtgatattatgttgcagataacgagctgcagtggcagcagctaatgcaagtgaaatgggttcggtacaacctaaagctggcttcacttgttgcttaacagcttcaattaatattttccagtaggaagataattgttctttcattgcattatgtccaataaatagtttaataattcaaggcgttatattgtaattttgatgctttgatcatactgaatctattggagaaaatgttttctgaatttcctaagcgggtgtaaattttgagaaaaaaatactatttacagatattaaattagtaatattttatcttggatcagtgagggttattgaagaatttgatgtagcagtaatagtatcaaatcgaacaaaataatttctttagtgatagttgatgattataaataaaaaacaatagaatgaatgactcattctattgttagtataatatcatacttaatgtgggctaactcagaatagttaaataaatgaccagccagtgatgatgatagcatcacttacactcattatttaacatagtgaatattatgactttttgcagctttggtataagaataatctgaggtttttttataaatatatttatctatttgcatgatgtagataatagtaaaataataattaaaatattctttactattttttatttaaaatgattaacaataaaatagttactattaatttttagatggtgaatatttataaattgcctgaagcaaataaatgcttcaggcgagttacttaataataaaatatagcaataatggcgcagtggaaaacaaaaccaaccataagaggaacagcggttctttttaccacatcaaagggttgcaatttagctccactggaaaccgcaatgatcacgcctgccacaggagacatgccgcgtcccatatgtgatgcctgctgcataggtaaaatcattgcaattggattaacccccatgctatgggcaatttgtggaataagttcaacgaatgcaaggaaaggtgcattacctgagcccataataattgcggcagccaatgtcacgatagcgaacactaatgccatggcaaatggtggtagaccaacagattccgccataacgatcaggctgtctattgcaccactgactttaataccatgagcaaaaacacccgctgcgactaatagcccaacaacattactaaatgcagaacccataccctttagaaaatgttggaagcctgcacacactgatttaaaatcacgtaagcgtaatgtttcaatcagcatacaaattgccattgaaattaatacaatagtgacgacatcaaggtgaataccttcaacaaataggcttgatgaacttactgccataataataggtaacattggcagtagggcataaaagccggggatatttttatcacttttggcttcttctgctatttttcctaattggggtacaaaacccgctttgcgatcacaatggcgttgccagaagatatgggtaataccaacagctaatacagttgcaatcgccgcaggcccttggtagtaaagcacatactcaaccacgcctaagtcaaccgcttttgcacctcgaatagcatcaatcgctgttggcgtgtaagcaacgcctaatgaagttgcaatgacaccggcagcagatgctggagataaacctagtcctatcataatggggaacatggtacccattagtagaacggccaatcctgtggctgacggaatagcaagttgcaaaatactcgcgagtaaaaaagagaaaaatagcaacacataaggtgagcgcatatttttcaatgggcgagttgcaacacgtacaacagcttcattagcaccaatatgatccatataatgggcgaatcccatgagtgccatgatcatcagacctaaatctgcagcacgactactaaagagatcacgcataacctcaaagggatctagccagctaataccggttgttttgacatttttaggcagaatatctccccaaccaaatatcattgttagtgccattaagattaaaccagcaactaacaaaaccggctcggctttatatccttttaagatcattctagcgacaataataacgacaattaagaccgcaagaatttggatcatgctttagctccgggtgcaaaacgctctgcggtgatcttaacgacagatttcaatacatcgctggcagcataaagcgatttaacgggaagatattcataaatagagtggaaattgtgcgccccggtaaagatattagggcaaggtaatcctttttgcgataatgctgctccatcatagccaccccgcatagggattggacgaggggtaataccattggctttataagcatcaatagcaatatcgataggatatcgattttcaccttgtagactattaaagacatttgcataacgatcggcttgcttacaaacaacagtcccttcaccccataacgcttcacattgctctgaaagttgttttaaaaatgccatacgatgggcgtagcctgcttctgtgaaatcacgcacatccatttttaatacagtacgtgcgctattacccgccagttgttttacccaataataaccttcacgaccttcagtatattccggtgcttcaccgcccggtaacatcgcaataaatttatgagccattaacagtgaattttttaatttaccttttgctgacatagggtgtgctgaggttccgataaaggttatttcaacatcaccggcattccaattttcatatacaagttcaccaataccacaacaatctaaggtataagcaaagtctgcgccgaattctgttacatcaaaggcttttgcaccacgtaaaccttgctcttcatcgggtacaaaaccaattttaactgtaccgtgtttcacttctggatgttgtttaaaatattgcaacatatccataatagaggcgatagccgctttgtcgtcagcgcctaataagctagtaccatctgttacgatgatatcgtcaccaatatagttttctaattcagggaattcactttgacgtaaaaaaatctcaagttctttgtttaagcaaaggtcgccacctttataaggtaaaatttgtgctttagtatcattagtttgttctgcactggtatctaagtgaccaaagaaagccacggtaggaacctcataatcaaggttagaaggtagtgtcgcggtaacaatggcagtatcgcgaattttgatatcttcaacacctaacgcctttaactcttcgactaattgtaaagcgaggactcgctgaccttccgatgaaggcataatccccgctgcgccattttctctatttgttgtagtattcaccttggtgtaagaaataaaccgatcaacaatgttcatgattagactccgttgtgttttttgtattttatttaataaaattctgttgtctcattattgagaatgaacaacagttacttttatcacaaaaaaagcattaaagaattataaaaaaataattttttttacaagaaaattttaatgttaatcaatgtttaatttttgttttttcattattaaaaaactgtttttaattatgaagatattttaaagtataattatttttagaaaaaacaaaaataagttttttctggtgtaatttattgatttttttagtgatttttgatgtttaaaattatttgtgaagatagtggtgagtaattaactaaaaattaattacttattgatagaatttagcgaaagtataatatttaattctgctaaatctattagggagcagatatgcaaattaaaagttattttaaaaacacgccattatcgctaaaaagcattaataatgagagttataaatttaatacaaaattgaaatcagctatattaagttgttataatacaatatcctcttttataaaaccattttttcataaaacttcaaataattcagaatttaaagttcatatttctaatattgaaaatatgaaaaagaatgaaaatatacaatcagataataaagtaataaacacgcctcactcaatgaaagatgataatgataaatttggagatttatctaaagtacacaaaaagtttaaagttgatgaaataataaatttaatcattaatgatattatctctgttttagaagaaaaacctacattagagaaaggaaaaattatacaatttgaggatgagttacattctcactctaaaagtattttatcatctactaatgacttgtctttaactgagattaaaaataaatttttagcatcaatcatcgatagcatattaacttcagacgaaaaaataaaatctgaatttgggaatattaataattataaatattttttatcaaatagtataaatgagacggttagtcgttcactggctaaagataaaaatcttgtaaaaaatggcgataaataaaatgataagcatgaattataaagcttaaataaatttaaaatcattaatgaataatgtagcaagttaacttatttatagctagtttctcaaggcctaataatattattaggccttgaaagagcatcaaatatctaagcgcttagcttgccatttacgagagcgccaacgccatgcatttgttaagcctcgtagccactcatcgcaaagaaaacctatccaaattccaattaaacccatttccatttttataccaaggaaatagccaataggaatagcaactccccacataaaacaaacggctgtaatgagtgggaatttggcatctccggctgcacgtaacgcattaaccataacaatattaaatgtacgcccaggctccaaaaagaccgataaaataaataaaggcaacagttggtcgataatgcgttgatcttcggtgatagaatacaaaataggatcacgcataaaccaataaataatcaccacgccaatagtaaatagcacacctgcttttaggcttttaaaaccccgtgtaaatgcatcatcaaatcgttttgcaccaactaaatgaccgactaatatttcattaccaatgctaatcgcaatgccaaataacattaagaataatgatagttggaaatagagtgtttgtgcggcgagaggaacttctcccattaagcctataaaggcagaggcggtcatataatgtaaaatccacactaggttttcacctgcagcaggtaaaccaatatgtagaattttggctaacatatttttagaccaaatcactaatagtcttatatcgaatttaattcttaatccatagaataaaagaccacataataagacaacggcaataatacgaccgacaactgttgaccatgcaacacccactaaaccgtattgtggaagcccaaagaaaccatatagtacaatcatattgccgataacagtgacaatattggcaattaacgtcacatacatcgccgctttcgatttaccataaacccgcaaacaggctgctaagataattgaaattgcttcaggaataagacaaatccccaaaatatggagatagttatagccatcttgtactaaatgctctggcgtattcattacatttagaatgttgtagccaaaaaagagaataataatggcactactaaagcccagcaaaaagttaaaggcgatagaaatatgaatagcttgactggctttatcgcgcttaccggcgcctaaatattgagcaataacaacgctacatcccacgctaataaagttaaatatggtgataaaaagatcaaaaacttggttacctacgcccattgcagctaaataggcagtagagacatgacttatcatgtaagtgttaatcaatagcgtggcaagatgaagaaaaatatcaataaaaataggccagctaagggaaaaaagtgagcgatccgctacatcagattgatgcattgaaaaccttcttaaaaacgagtgaaatagtgttgtaaatataatcagaggaaagtggagcgattttacatgctttatgaataagggaatagctaaattgatgaaccagtagcaaaaaaactttttatatggtttattcgttgattattaaacattattatcattcaataatgattaacaacgagaacagggaaataaatgaatactaaaataaaagtcgctattgtgggctatggcaatattgggcgctttgcactagatgcagtacttgcagcacctgattttgagttagtgggggtggttcgccgtgatagtcaaaatattccagaagaactgcgaaatataacagtaacaaatgatattaaaagcttaggtaaggtggatgttgctttattatgttcaccaacgagagccattaaagatttggctaaatcgatattgagcttaggtattaataccgttgatagttttgatgtccacagtgatatcgttgcattaaaaacagaactggatgaggtggcgaaaaagcataaccgtgttgcagtgatttcagcgggttgggatccgggttcagactctattattcgtaccttaatgttagctatggcacctaaaggtattacctacactaattttggtcccggtatgagtatggggcatagtgttgccgctaaagctattgatggtgtaagagatgcactatcaatgactattccattaggtactggtgttcatcggcgtatggtttatgttgaattagaaacgggtgctaactttgcacaggttgagcaagccattaaggccgacagctatttctcatctgatgaaacacatattaaacaagttgatagtgttgatagcttaaaagatgttggtcacggagtacaaatgacccataaaggggtgtcaggcaaaacacacaatcaattatttgaatatgctatgcatattaataatccagcattaacatctcaatttatggtttctgcagccagagcaagtatgaaacaacaagcgggtgcctatactgtgattgaaattccccccgttgattttttagcaggggatttaactacattaatcgcaaaactggtgtaatcagttaggcttcttgcaaataaaatattgcccacatgatgtgggcaataggatcaacgcttaggcaaacttgatgatttgagattagcgtttaatatttttaaactcttttgttgttgcagttaaagcgacttctgttggtaaacgttccattgaacttgcgccataaaaaccatggcaatcaggacagttatcaaggatatattgcgcatcttttggtgttgctatagggccaccatgacaaagtacaatcacgtcagaacgtacggattttgctgcttttgcccaatcgttaataagggcgacacaatcatctaaagtaacggctgtttctgcaccaatattgccaccagtggttaaacccatatgaggaacaataatatctgcaccggcttgtgtcatcgcaatggcatcttcacgactaaaaacataaggtgttgtgagtaagcctttttcgtgtgctttacggatcatctctacttcaagagcataacccatacctgtttcttctaggttagcgcggaagttaccatcaattaaaccaacggttgggaagttttgtacgccagcaaaaccgatggctttaacgtcatctaaaaacttatcaaaattgcagaatggatctgtaccattaaccccggcaagcacaggtgtctgttttacaacaggcaatacttcttttgccatatccataacaatttcattggcattgccataggctaataatcctgccagagagccacgacccgccatacgataacgacctgaattatagataacaatcagatcgataccgcctgcttcttcgcattttgcggaaaggcctgttcccgcaccgccaccaataataggttctttacgtgcgatcatgtcattaaattttttgagtaacacttcacgtgaataagtcatacttctttctccgtggttaacaaataagttcctggtgtaaatcataaacttgctgattaaattcagcagaatttatgtgatatggactgatgactaattgacgagtctcggtctctttaaatgttgttataaatgcatcaaaaaatgcttggtttgcttgaggatcccagaatggccccccttcaatatctaaagcagaaaaaccgccctgtggaaaaataaacgtcagtgggccttcacactgattcaatttttcagcgatccagatccccatttgacgattttcccttggtgttgtacgcattaaggtgacttgcgaattatggtgatagaaatgacgatctttatatttctcaggtacggtagcagggcgaccaaagttcaccatatccaacgcgccacaagagacgatacaaggtgttttagtgcgggcgatggcaccaaaacgatcttcatcacaagcaaggacaccctcaaataaataatcacatacttcggttgttgttagatcaagaacactatgaagtaagtggctgtctatcagtttttccatggctttaccgccactccctgtcgcatggaaaactaaacagtcataattattttcaagttttttagtcagttgttgaatacaaggcgtagttacaccaaacattgttaatgcaacagccggtttatcaacactattttcttcttggtaaaaataaacagcgccggcaatttggttggccgcatttctcaataccttacgagagatacggtttaagccggatacatctgttacggagtacatcattgaaatatcgctagcgccgatatatccggagatatcaccggaagccatagtcgataccatcaatttaggtacgccaatgggcaaagattgcattgctggcgtaatcaatgccgttccccctgagccgcctaatcctaaaatagcgaggacatcgtcacagtgggttaaataacgttcaaaagcgacggacattgctgcgatagctttcccgcggtcaccgcaaaacacggcgttttttccatctggatggtaactagcaacttgtgcagctgtgacgtcagcttctctttctaatgctgtaggtttggttgtcaaatctacggttttgacaggaaggcctgctttttttattaattcactgacataaaaaatttcagcgcttttagtatcaagcgtagtcgcaatataaatgaagccagcatactgtttcataagccttcccttaccttttatgattattgacgtgtagattataatcacaatgagacttgagtttcatttataatagcattattttgagacccatgtctcattatttttattttttctcttttaaatgtcgcttaggtacactcaatcgcctaaagtaaactttaatcgtattaagaatagttcttaaaatcagtatagtagccacgaaaagtggagtaatagcgaaggaatttttatgagttttagtcgtaatgaaatagatacaatgtcaggtactcgaaaaagaacctaccaattattggtgacaacggcattgcaactttttgaacaagggatgttacctaccgtatcagagcttgcagcacatgctggtgtttcaagggcaacggcgtatcgctattttcccactcaaagtgatttaattagtgctactgttgatgcaagtttagcaccgatcattgcatggcagcccactccagaagataatacacaacagcgtattactgcgttgctcaatcttgcttatccacaaatgtttaaacatgaaggggcgttgcgtggcgcattgcaggtttcattacagcagtgggctaaagagcggcaatcaagcgaatatacagaaaaacgatttattcgtggtcatcgtaaagagatcttacttaaagtcatcgaaccattaaaagcgcattatccgcaagaaatgtgggataaagtgataaaagctttctcacttatttatggttctgaagtttttttagtaatgaaagatatctggaaaatggatgatcagcaggtcattgatatgacccaatggatggctaaagctattttaaatcaggcaaagtcagattttccgatagataacgattaattatttgaataaatcggttaaaattgtataaatcatttacgttttagctattgtaggatcgttatgtcacacaaaactgcagaccaagagtggctggtagaacaactaaaatatattgcacagggcattggtaaaacattatcgcctttttgtgaagttgtacttcatgatctgaccgatagtgaaaataccattatggtgattgaaaataatctatcaggtcgaaaagtgggggatagagcgactgagctaggtatggcaaggattgaatcgtctgattttccacaaattgttgcaaactatcctaatcagtttcctgatggtagaacagctaaaagtacatcgataggtattaaagataaacaaggcaattatgttgctgctttatgtttaaatattgatatatcgatgattaaaggtttacaaatggtattaaatcaattttcgactctcgaagagggaaatcatatcattgaaacttttagctcagtaacagaagattcgttgaaaaaacgtattgatgaattttctgcaacttattcagtgacaccaagagcattgaaaccacatcaacgacgcgaattgctattgtgtttacaggatgaaggttatctttcacttcgcaaagcaatggaaattactgcgcaatacctcggtgtttcaagagcaacagtgtataacgatttaaaagaatgattaaacgataagttattttttaaattccagcggaatacaaatcattaaactaaaaaaagatatcatttttgatatctttttttatttctattttaaatttaatgtgatttttattgtaaatgattaattaattactactgtgttatttttgtaagtataaattgataaaaagaataaaataaacagttaatttattaatgtaagggcaataaaatgaatagagttaatgatgtaggtgtatttaataagggaatagagttatctactaagaaagattatttaggatcatgttatgtaactattgcaaagaacataaaggatatttctaatacaacggctaagcccagttttataaaaaaagttattcatatgatggaacgatttacaatgttttttgcaattagccaaaccggtagaatgggaataagtaatagagatggaaatttaaatagatatactgaaacacttactgatttaaagattaaggtgaaagatttaaagtgtaagatagatgagtttaataataaactaataaaaaaagatacagtagataaggaaaaagctgagatagctacaattacagctgaatatcataacctaaaccattttctctctttaatagagaatgaaaattcaagttttaaagatagatatagttttttcaattatttaaatgagttgcaacgagcggaggccttttgccgaaattcatcaaatacagattataatcatctggcggatgaatttaaaaatattattaaggaaagagttgaaagaataaaaaaagaagatgttataaaaatatttaatgaagtgttggtaaggtatgataatgaaactcgatttaaaaatagcaatgaaagaatactagctaatttttcaagtaataaggagaaagaaaaatttctgtctaaaataaactttctagtctgtgtttcaaaatataatcttcctcttatggtagaggtagagcagcttaaagaagaatttccagtacagttacgggaaataatgaataaaattctttatgaagaaagtataatgggtgaaattcttaatgaagcgaatattgattgcgtatataagtattcacttaaaaaagtgcaaaatatttggattgaagaatatataaataagttttatggtggtgaagaaataataatggataaaagtacagatgataatgtcgcttattttgtgggggattttgagtgggatagttttgatggaattaataatactaataatgacaatatgaattctaaacgtaatctttctgaagcaagtgaaattattcatggaaaattaaataaacatgttaaaggcgatgaaatatctgatttaacttctattctggaacaaatagaactagataaattaggaggaaaagaaacatatactttaatttctattctgaaagagatgggactgggtaatttagaatggaaagaaatatataatttaatttctattctgaaagagatggaactaggtaaattagaatgggacgaaatatatactttaatttctattctgaaagagatggaactagataaattagaatggaaagaaatatataatttaagttctattctgaaagggatggaactaggtaaattagaatcaaaagaaatatataatttaagttctattctgaaaaagatagaactagataaattagaatgggacgaaatatatactttaatttctattctgaaagggttagaactaggtaaattagaatgggacgaaatatatactttaactcctcttctgaaagagatagaacgaggtaaattaatagggaaaggaatatataatttaacttatattcaggaagaaacagaactagatgaagataatataaataagggtaatttaaaagaaggtgatataaaatatgctaatattgttgaattagtcgaagatcaagtatttacacaattaaatgtagatggatttaacataatagatagcgactatgcgttctcatctgaataaggaaaataaatattttatagtataaaatatttataatactttgtttaaataatattttttgtcactaatcggataattttctaaggtgccaaaaacttcaaatccctgcttttgataaaaaggcagggcttgaaagctaaaagtatccacctcagcatatttggcacctttctttttagctgtattctccattgcttgcagtaattctgtaccaatattgttaccacgataggccttatcaacccatagataacgaatacgtagccaattacctaatatatcaccagtgatcccacctatttttttaccattttcctctttaaaaacggctaagggcgtatattgctccatctgaatatactgaaggttatgtgttaataagccttcataaatttcgttgatttcattcgtcgtcggggcggtagtaatttttaatgacataattagctcttaatattaataaaaataatatttaaattatcattatttgtttattaaatatttataccagtgataggattagtaccataattaaaaaaactggataacacaacatgtcatttttaaaaaaactaccgggaattctgttttgtgcactaattggtgggttattaacattatctggtctaccgatggcgttgatgtttgggccaatcgtcgtggttattattgcttatcgttttaaatggcagctctctgttcctaagcatacactgacttttatccaactgaccttaggcacctctgttggattgatgtttaaccaagtacatttagggagtgcggataatttagtgcttcttttgattatcctcgttatttgtttagccattcaatttgttgtcagtttcttatggtttcatcgtcatattggttggacaaaagaagaggctatgttaggtgctgtacctggcgcgatggcggctattcttgctttaacagatcataccaaaacgccaccacaaaaaattgttatttctcatactattcgtttaatcgtattgattattatggctggatttattgttggctcagataaagcaactcttacggagtttacattacctgaaatgacactgttgtcatcgatgtggttattattaattgtcgcgttagggctagtatctgggcttttattacagaaaattcattttccagcaccgtttatgttgacatcattaggcagtgcaatattggtacaatattttgtcagtgagccgattgcttttccaatgctattaaatgaactcagcatggtgttaattgggatgaatattggcgcacattttgtggtttttccttttgcttcgttaattaaaaatgctttttcctctgtgcaggtggtcattatcaacgttattttaacggtgatcgttgcattgagcgcagcttatttaacaggggctccctggacaacgctggtattagcttgggcaccgggaagtatggaagcaatgacatttgccgcgatcactatgaatgtcgatgcggcttttgtgatgtcgaatcatatattgcgcatgttgatcattcaaagtattccttctattgccttgttttacagtgaacgaaagcagaaaagaaaacgtgagtaaaatagcaataacagtaagatatcgacagatataataaattgaaaagccactgtatcagtttgatagagtggcttttttatacaattaatagtttagtaagctaagtgatttttgggctagtagttgacattttttgttatgagcaatttgtatattttttaaatcctgataactatcttcattaagcttgctcattgggagcattgaataattagagacatcccactgctgagattgtgaaaaaataatcagcgctcgttctattttttgttttgagatctgctcataaccacaatcattatttaaaaacaggtataccgcggttaaatcagctaagtcttctgcttgagtataagtgagtgcttttgcactagaagaaaaaagcgtggcaaaagaaagaataatagtgcagaacaaagcgaacatttttttcattagtggtgacattcctatatgtgatgatttcacaagatttgttatttgacttaattaagttaaaagttttgcaaagacccgttgctttgtgtggtttctatttgaccttccagtaaggggagactttagcattgctcaatagtttatcgataaatttatttacctaattatgacaaatatagagtaattgattttattcaaaggaatacattatgcaacgtcgtgaatttttaaaattaggggcaacattaagcgccgtcacactattaccaagttggagccgtctcgcattcgcccaaactaacacgccttcactcgctattccacctcaaattagcccagacaaacaacaaaagattgttcttaatatccaacaaggtgtttcccagtttactgctacagcaagtacaactacttgggggtataacggtagcttattaggcccagcattaaaattaaaacgtggtgagcctgttactattgagatcaataacacgttaccagagactacgacggtgcattggcatggtcttgagataagtggtgaacaagatggaggtcctcaagctactatcgcaccgggtaaatcacgaacagtaacttttacgccagatcaagcggaatcgacatgttggtttcatccccatactcatgggatcaccggaaaacaggtggcaatggggttagggggattagtgatcatcgaggatgacgaaacggccaagcgaaagttacctcatcgctggggagtggatgatttaccggttattttacaagacaaacgcttagacagtaacggtcaaattgactatcaacttgatgtgatgagtgctgcagtaggttggtttggcgatatgatgctcactaatggtgcaattcaaccgcaacatattgtaccaaaaggttggattagattacgtttcctcaatggttgtaatgcacgtagtcttaatttagccaccagtgatggccgaccaatgtatgtaattgctagcgatggtgggttattagcggaaccagtcaaagtgacagaactccctattttaatgggggagcgttttgaagtactggttgatacctcagatggacgtgatttcgatattgtcactttacctgtccgacaaatggggatggtattagcgccatttgataatgtattacctgtattacgtctactgccttcagcagaaaaagcggtgggtattttacctgatcaattagccttaattcctgcattaccatcactaagtcatattgcgacacgttcattacatttacgtatggatatgcgtttagatatgcaaggtatgatggcgctaacggagcgttacggtgataaagcgttagcgggaattcaccacggtatgagtcatatgcgtcagggcaatggaaatggcatgatggggggcggcatgaattgcggtcatggctctgcggatgtcgatatttataatgcaaatagcatcaatgggatcccattctcaatgaccgaacctgcatttgatgttaaacaaggggtttatgaacgctggctggtttctggtcgtggcgacatgatgttacatccattccatgttcacggaacacagtttcgtattttatcggaaaatgggcgtaaacctgaaaaacatcgccaaggttggaaagatattgtcagagtggaagggcaaattagcgagatccttgtaaaatttgaccatttagcgacaaaggaacacccatttatggctcactgtcacttattagaacatgaagatacaggaatgatggcgggctttacggtgagtcgataatttttactgtaataagtaacaaaattagcgataaaagtttgcaaagggagtaaagctaatattttattcccttattttccttcattgacaacgtcgcatgatgatagaaattctggtacaatcggttgctttccccgttaacccaatcgaaataaatcatgaaacatattgttgatgtcatgatctctgaagaagagatcaaacagcgtattgctgaattaggtcgtgaaatcacagaacattatcgttctcgtcaagaaaaacacgatttggtcttaattggcttattaaaaggctcttttatttttatggcggatttatgtcgtgaaattgaagtgccacatgaagtcgattttatgacagtatcaagttacggtaatggaatgacgtcaacaagagacgttaaaatcattaaagatcttgatgaagacattcgtggtaaagatgttctgattgttgaagatattattgactcaggtaatactttaaaccgtgttaaagagattttaagtttacgtgagcctgcctctattgctatctgtacgctacttgataagccatcacgtcgtgaagtggatgtgccagtagagtggattggctactctattgaagataagtttgttataggttacggcattgattatgcacaacgttatcgtcacctaccttatattggtcatgtaacgctactagatgaataatcttgttgatttatatcgtatattaaaaaacccgctttggcgggtttaatattagaaaatcaacgtggatggcttaattttgcaatagcttggcgataagagagttctagtttttcacgactgtctgaggtgatatctaaatcgtgtaattcaccattgtttaaaccgtaaacccaaccgtggatcatcactttttgtccacgtttccatgcggcttgcataatagttgagtgaccaaggttataaacttgttctatcacgttaagttcacagagtaaatttaatctatcttgtggtgcgagttcacctaacatggagctatgtttataccagatatcacggatatgcagtaaccagttattaattaagcccagttcagtcccttcaatagcagcttcaataccaccacagccataatgaccacaaacaataatatgctcaacttgtaggacatcaacggcatattgaataacagaaagacagtttaagtcggtgtggatcacaaggtttgccacattgcggtgtacaaataaatcaccaggggcggcattaattaatttttcagcggggacgcggctgtctgaacaaccaatccataagaaatgaggtttttggcctttactcagctctttaaaaaattgcgggttttcttctgtaacagaacttgaccattgtttattgttggctaacagttcttcaatttttctcatcatgatgtgactgcctgtaaattcagtttcccaccatttgcgctgacagtaggccaacacgaaatagctttagtgttattgttggatgtttaagctcaataaagaaagggtatttttataccattacttttaaatgaatcagaaggctttttttgagccaagtgacagttaattgcttgtctatttttgctttcaaataagatagaactttttacagtatttgtttaatgaatttatcaacacattatttgatgtaaatcaaatgtataaaaagataactgattgttaactcgattattcttattttgaataatcgagggtaattattttttcataaaaaatattaatgtttatttgggctggcgaatgatgaggataaaacctgttaacggtatctgtccgttttttattgataaattattggaggtaataaagcgcatgataatatctatcagttagattgagtaataaggccaataaatttattgctataaaacaggctaaataataacatttagttattattggctttttattgagattaatactggaaaatagctacaattaatcgtcatttttattgatcagtaattgcagtgttcgctctgttgactattaaaatagttaaataaaatttatttatctgtttgaggcattatctgtaaaacggtttatttacgtcttatttttctctagaatatcttattccattttgatcctattgaactaagcccattttctatacctatcctgatttgcactcaggggagtaaggcttagttgaatagctatttctgatttcagctcagtcaatgctgaataatgcagttgataaaaggtaatttccacttatgacttatgcattggagttaaccgagttaacgaaaacttaccataatggtgtcaaagcgcttaaaggaattaatttaaccgtagaagcgggggatttttatgcgctattaggccctaatggtgcaggaaaatcgaccaccatagggattatcagctctttggtgaataagagtagtggtaaagtcaaagtatttggctatgacactgataccgatatggttaatgctaaaagacaactcggattagtgccacaagaattcaatttcaacccttttgaaaccgtattacaaattgtccttaatcaggctggctactatggtgtaccacgaaaagtggcattagagcgtgcaaaaacgtatttaacccaattagatttatgggagaaaaaagatgatagagcacgttttttatctgggggaatgaaacggcgtttaatgattgcgcgtgcattaatgcatgagcctaaattgctgatcctcgatgagccaacggcgggagtagatattgaattacgtcgttcaatgtggacgtttttacaacatttaaatgcacagggtaccactattatattaaccacacattatcttgaagaagcagaaatgctgtgtcggaatattggcattattcagcgtggtgaactggttgaaaacaccagtatgaaaggtttattaagtaaattagagtctgaaacctttattttagacttagcagcaaaaagtccgttacctgaattacaaaattaccaatatcgtttagtcgatacatcaacactagaagttgatgtgaaaagagagcaaggattgaatggggtttttgctcagctcaatgcacaaggtattcaggttttaagtatgcgtaataaagctaaccgccttgaagagttatttgtgcatttagttaatgaagatcatacagaaacagaaaaaggagagagggaatgattcagttgtattgggtagccctcaagacgatttggattaaagaagtgacccgttttggccgtatctgggtacaaactttaattcctcctgttatcacgatgtcgctctattttgttattttcggtaacttaattggtaagcgtattggtgatatgggcggtgttgattatatgcagtttattgttcccggcttgattatgatggcggtgatcacaaactcatatgctaatgtctcctcttcattttttggcgctaaattccaacgtagtattgaagaattattagtatcgccagtaccgacccatgttgttattgccggatttgtggggggtggtgtcgcccgtggtatttgtgttgggatattggtcactctggtttcactattttttgtaccactagagatacactcttggacaatggttgtggtgacattattaatgacctcgattgttttttctctcgcaggattgttgaatgccatttttgcgaaaacctttgatgatattagtattatccccacctttgttttaacgccattaacttatttaggtggtgtgttttattcactctccctattacctgcattttggcaaggtgtttctaaattaaacccgattgtttatatgataagcggtttccgttatggttttttagggatcactgatgtgtcattaacggtgacaatcacggtactatgcctgtttattgccgtgttttatatcgtagcctggtacttaattgaaaaaggtcgcggtttaagaagctaatctacaaattagtgtttaaggtaataaaaattaaaatcggtgtctgcaacaacagatgccgattttttttagctaaatttcattcagttatgttaaattttatttaaatttgtcttttgctattaacaagtttaatttctttgtttagtatactaaacaaataactttgggatggtaaaggatagaagcatggcagtggcaagcgaaacagcaaaagaaccaacggtactttctcgtcgtaaattgttatgtattgccggaatggggtggactttcgatgcaatggatgtggggcttctcgcctttttattaacggcgttaaaagaagattggggattaacagcagcgcaattaggttggattggcagtattaattctatcggtatggcagtaggcgcttttgtctttggcattatggccgatagaaaaggtcgtaaaccggtatttatcttaacgttgctgctatttagccttggttgcggtttaactgcattagcaagctccttaatggtggtattaattttacgcttttttattggtatgggattaggtggagaattacctgttgcttccacattggtgagtgaaagtgttaaagcccatgagcgtggtcgtattgttgttttattagagagtttttgggcggtagggtggttaattgccgcgttaatagcgtattttattattcctgattatggctggcgtatggctatgttattgagcgcactacccgcagtttatgcactctatttgcgttcaaagttaccagaacccagttccacacagtcattattacaaaatcgtttatctcttcgccaatcaatggcattgatttggtcacctcaatatcgccgttcaacactgatgttgtgggtattatggttttgtgtggtgttctcttattatggcatttttttatggctaccgagtgtcgcaatgttaaaaggctttagtttaattaaaagctttcaatatgtgttgatcatgacactcgctcagttaccgggctattttaccgcagcatggtttattgaacgttatggtcgtaaatttgtgttaatcacttatttagcaggcaccgcgattagcgcttactattttagcgtagccgattccacaaccacactattagtgttcggtatgttgttatcattttttaatttaggtgcgtggggggcattatatgcctataccccagaacaatatcctgatggtatacgagctacaggcgctggaacggcgacggcaataggccgtattggcggaatattagggccactgatggtaggctatttagtgcaatatcaatttgacataagcactatttttcttatttttagcctttccattgtgatagcggtactagcggttatgttattaggtaaagaaaccaaaaatagaccacttaattccatttaatcactttttttatgactaaaaatacagaacgtctcctttcttgttatatgatagttaataagtattttataggaaaagaggaataattatgtctcattatgaggaagtgattaagcaggttgatgaggccattgccagtgctagcatacaaacgatgaacgaattgctggtggaattaggtaaagataacacaatagcttttgctcagcgttatgaacagcaagagcgtctacgcacggctatttttcatcatggtgaaaaacagcgttaagcaatcctatgatgatagaataatcaaaaagcgtttatttcatgtatttattccataataatggataaacgctttgttttaatctgttggtttaaaaagtctttttcccttcgagtactgctattctattttcaatcgaaggatgggttgaaaaaagagagtctcccttattaaaaataaaggctgctttgcgatatgctcgtcctgtagagccatcttcaaaattttcagtttcgtgttgtgctgcaattttctttagtgcattgatcattgattgattatcttgggtgagatcaaccgctgccgcatctgccatatattcacgtgtccgcgataaatagaaatagagcacttgagtaataatgggtaaaacaacgttgagtacaattaaaatcaatcgtgctttactggcggcatcattacttttaccaccacggttaccagaggctatatataagcggctaccaaagatatttgttaccgttaaaataacatttgctaaaatacccacatacagcgttaaacgggtatcaccatgaataatatgacctgtttcatgggctaatacggcttgtatttcttggcgattaagttgatttaacaacccacgagtgacaccaataaaggcatttttttcagaccagccggcagcaaaggcattggcttctggtgtatctaaaatataaagcttagggatatagcccaaagtcgcacttaaactaagctcttccacaatatttaataattgtcgctcttgggcatttaatggctcttcaggattaattagtcgcgctttcatgcccgtcaacatgattttatgccctttaaagtgaacaataatcagcaacacaattgaaatggcaacaataatcaatgaagcaataggcagtgattggaatgtcagaaatgccagcatattatcaattaaacttaaatgaggattggcacctatcgcgctatcaactaataagccgatcattagcattaatagtaaataggtgactatcacaaaccgagtgcgaatggcattttttcgcagtacatttctgaaatccatttattattctccaataatatctaccgtattattttatgtataagctatggtgcgtggtgttaatcaaagttaatacggcgcgcttcttctgatttaatcgctgtttcatcaagacgccagtattctttattaatcacgagacttggaaaaatcttcacaataaataccgcagggatagaggcgataaacgcacgatattgctctaaggtacggttatagccacgtttagcaaaagagagtttattttctgttgagacaatctcttcttgtaaattagccatgatagtatctgatttgagttcaggatagttttcaacagcgacattaatcgcaccacttgaaacaatttttgatagctcatcttctgccgcttttgcttcttggttattgctactttgtgttttagctcttaattcggtgattttagtaaaaacatcggcttcatgactaagatatttttttactgtagctaataagctatcaaacactttaccacgacggtcgagttgtaccgatatttctgtttcacttgagataaccgcttcacgcatagagataatacggttgtaataataaaaaataagacccaataacgcgatggtaataattaatccagtcatgtgaagcgctctcttttctaataataaacagggaatttagctaactcattgatgttaattttgcctattattattcaagatagctagatgattatttcatcaaagagaaaaagaatattgatatgtcacttaatatcttaaaaagaatgttgtttgaagtataaaaaagccccaaataaatttggggcaaaataaataggactcatgttagggaaaataaaaattaaaaccaaggtgattgggacatcacattgccataaaatagcattctgccggcgatttcaccgctaaaaaggataaaaatagtaataattgatattaaagcctttgtaaacaaagagctacgagatagtgtgataataacacatcctattattaaactggcgatgacttgccaccataacaataagctcgctacgttagcacctgaaatttggactcgtattactaatcccatcaatactaacagtaagccgataaaagcaccgaaatgcaatgtatgaatggtttttttaccttgcaactgtaaccaaggaataacagagccaaaacccaataatagggccgtaccaataaaacttatttgtgttgcgggggtatgccataacgcatgtgtttgcatttgataataaatttgtgctgttattaaaataacgggtaagccaataaggccacagaacagacctagtaggctattacggcgtattttatttggttgtagccaacttgctaatgcccagagggaaattaaaccgtttaacataacaaaggcaatagcttcacgacttaaccatgagtgagcaacaccaagtactgagcgataagcgccgagaggatcgcctaggtgtcccattgacatagaagaaccaattacttcaattaaccaaataagggcaatcgttgtacgtaacgctttggggcttaacatggcggagttttgtgtttgccattgataaagagataaggcaagtacggcaccgatcccccattgactcattacggtgaatagaaccaaaggcatttgataatcatgcatggttaatcctccataccaataatgacaatattaggatgactgatggtatgatcaggaaccccataacgtttttctaataatgcccaatttgtgatatgtttttggcgcaaatcttcaatttcgccaaactcaatggcaccagttggacaagattcaacacagcgaggttttaagccttcgtctattctatcggcacacatattacatttactggtcttcccttctacaggatcgtaaaccggcgcattataagggcatgccataatgcacatttggcaaccaatacatttgtcatgatcctgtatcacaatcccatcagctcgcttagtataagtatcggcagggcagacttttaagcattgtggatcgtcacaatgattacaggacatagtgataaaagcttgcgcattgggcagatcttcattgaattcgcgtactctacgccacaagactcctggaggggtaacattttctgatttacaagccatcgaacaagtgcgacagccataacaatctttactattaatcagaaaaccatactgttttttagccatgattatgcctcccgtctcacattaattagggtactgttacaacaatgaccattacctaaaggttcaacatggtcatttgttacatggctactactccccccttgttgttcccaccaaccattatcaagagaaacaacaccttgttttatgtgtgtggtgacaacggctattgctctatgttcacctctatcattaaaagcaaacacccaatcaccattgtttattccacgagataacgcatcattaggatgtattaaaatattgggttgattacgctgtacttctaaaatccattcattcatcccatggcttgaatgaacactacgtgctagcttacgttgcacagccattaacggatatttttttgctaattcaggggagcctgttgtcgattcctttactggataataagtgactataggggagtagtttttatcttgccattcttcaataaagaaatgtgctttttgggttgatgtacgaaatattccgtctttaaatgggatccaatcgccttctactggtcgtacaggccctttttctagcatttcccgcgtaatccccgatcccgcgaggcaagtatcaatatagtgctcaataggttgattaaatacgtcaccgaaaccaaagcgttcagcaaggcgggcaaaaatccaataatcaggctttgcttctcctggtggttcaacggctttttccattaattgaacatattggctacgcacaccagccattaaacttgtatcttcaaaaatggttgtcactggaagtactaagtcggcataaagcgctgttgatgacattaaattatcggctacgacaacaaaaggaactttttttagcgccttacgtaccatattggtattgggtaattgtgtcatcacccccattgtcatgatccaccagaaattaattgggtggggtctttcgttgactatccattcacccacttttgcaacaggaataggattaatgggtttaacatttggtgcagggggaataataggattaaattttgccatctgacgcacgccaccggcatcacaaatacccgcgcctttcttaccaatattgccggttaatagagcaagataaaactggcttgctgcaacataggcaccaaattcagtgcgttgtgcgccagacatattttgtacaatcattgcaggctttgttgtcgcgtagtctcgagctaaacgaataatagtctcttgtggaatatctgtttctttactggttttttcgatagtccagggtttagcttgccaatagatttgttcaaaaacggtggtgtaatttattttatttggcagttcatcatgagttaacgccggtacaatattgggggtatcatggcgaacaatttgctgagttagggtatcaaagactaaatagctatctttatcattagctgaatcacgtagtagtttttgttgttcatcgactaaatacaccgctccggtatgggcacgcaaaaaaggtttatctgtaagattttcttcaatgattaatttgatcattcctaatgcaagggcggtatcggtacccggaataatggggatccactcatcagctttggctgcggtttcattaaaacgcggatcaatgactaccattctggcaccattacggcgagcctgattataatttttaaagtaggcgtgcatagttactgctgggttattgccccaacatagaatataacggctatcttttaccgtatcacgcgtatctgcatagcgtaggccaaccatagggatcatagctgcagtaaccgcagagcaacataaagagccggcttgttttgtagaaccgcctaaatagtcgaaaaaggctttacccatatcgtttttgatggaatccatatttccagcgtgagtagaaataaaaagcccttcgttgccatatttatcgatagtttctcgaatatttttttcgataagatctaaagcgtcattccagctaataggtttaaactcagccttacctttttcgccaacacgtagcaaaggtgtagtgagtctatccttatgatatacccatttagttcggctaattcctcgtaaacaacatttgacattaaagccttctgtagcttcaattttgattagttttccctgatgagtaaaagcggttaggttacaatggagacattccattgcacaggtggattgaaaagtttgatattcagataattttatccgagttttctggttaaatatgggtttattttcattagctaggctaaacgcattaggggaaagagctgccaaaccaatagctcccattccttttaatagcgttcttctatctaattcccactgtttatttttatacataggacattctcacacataataatgttaactatatataaactcagttcattaataataaacttgagttagatcattcaaggataaataaagaagataatcaacagaaaatgatttatattcttatttttcataaaatttttagtgtgaataactataaaaatgaataaaaaaagaacaaacaaatatcgtcataaataaagataaataacgtcttaggcgtggagaaataaatgcagaattctcaaggggttaactctgttgatatcgcagtgactattttagagtttttagcatctcaaggaggtgctgcacgctcttctgagatagctaaggcatgctcactatcaaaaagtcgtctacataaatatttagtgtctctttgccgtagtgacatgctctatcaagagagtgaaggagggcagtattgtttaggtagcaaaattataatgctggctgaggcaacacacacaaacctctctttagttgatgaaattaatcaaagactttgtgaatttagagatgagcataatatgtcaacaggacttgttattgctcaaggtaagaagctctatttagtgagatataatcgtagttttaaacatgtcgatattgattttctgccaaatacacccgttccacataaattgagtgcggcaggcgcgacttatgcagtctttagtcatttagaaattgatgctgatttatcaatacagcaaaaaaacagtatacatcaacaaggttttgctattcgccaacaacccgctgaaggtattcctggggctcaatctattgcatgtcctgtatttaataggaaaggtgaaatggtcgcagccgcattgaccatgggatttattaaacctgaaaaccaaatagaattaggtaatgcattaaaagcaaaaattcgccatgtattatcttaatattgcgaatatttttatcaaatacgtttactggaaaagtaaacgtatttgaaaatagcaaaaattaagtaaatagtcctttagctaatatatcgcttgcttgtgtgacaccgggtaatacgaagtaataacccccaccaaaaggttttatatagcgctctaacggctcgccatttaaacgcttttgcgtatcaataaagccttttttaaggttattctgaaatgagacaaagacaagccccatatctaattgccctgacggcgttagccctaatgagtagctataactgcgacgacgcagtttggcactataacgttcgggggttctgggctcagctcgtctcatatgtgaatcaaagagtatcctgtcgccatgaggatcttgcgcaaattcaggtgagtccatttcttgcttcatacctatcggcgcgcctgttgcacgatgacggccaaagttattctcctgatcttcaagaggtgttctatcccaaaattccaaggcaaaacgaataagtctcaccgcttgatagctacctcctaagcaccattgcggttcattttgtttatcggtgatccacactaaatcatccattaaatgagtgtcagtggcaggggcattacctgtgccatctttaaaaccaaataaattaattggcgtttgttgattatcaatatcacgagcaggtagaaaaccatctattttccatcgtgcatgcacttgcccagaaagatattttaaaatatctcttaatgcataaatgatactttcttgactattggcacaaagctgaagtaacagatcaccgccacaccatttaggatctaagcgatcgttggggaagggtttcattgcttcaaggcgtttgggtttatgagcttgaaaaccaaaccgattatcaaaaaaactatcccctaacgccactgtgatggttaattcatcaggatataattggctacctaaaataccggatcctgcggggggaaggtgaggattatgactttctttaagttcacgagattgtgttaaaaaagcaatccgctgtgttaacgttcggaaaattttttctacttcctcaggggttgttactgttaaatcaagtgcaataaatgaagcatgcttttgttctggcgtgataaccccagcttgatgttttcctaagtagttaatagcacgttgataacgaagtgttggtgaacacttgcttttttcgatggcatttgcgcccatactggcaagcagtaaactaccgcctaaccattttaacgttgtacgtttatggtggttaacggggattgtgaggagtgatttaaacagagttttatttttcaccatatgcttctttatagtaataatagacatcaatattgagcacgttacgtaattgtgcaacttgctccgctaattgtgttatttgtgcaaagagcacggctttctcactatcagaaagcgtatctaaaggctgaaataattcttcatctcgctgatattttaaaaatagtttgctaatagtgtcatactgtttgcgtagtgattgatattcctgaagtggaatatggttagatagagactcaatgattaggcgtgaaccgtataaattggcatacccatcccccagatcactttttgcatattgattttcaatgccggctaatttgtcggttaaaatcagctctaaactatcacctgcagattgcactaatttagctatgggaatatcttcaatcgctaagcgtttttttagatcactaatgcctcttaacagtgctttggctgactcggctgacgattgcatatcctctaatttaaagagttgatattcaaccaaatgaaatccactaaaacggggcgagttttctctttcaagaaagaaatcagcccgattatttaataggcgttcagtagcgccaaacaatgcaataatcgggcggatcacctcatagtgataatgcgcttgttgataggcgagttgggcatcagtcagttgatttttttcactgttaacaatgacattttttaatgcagtttcaactaaggtcaactgatcaacagctttctgccgatagttaagaatattggttgtaaatttttcaggagtgggaatatcccctttagcaacaacaatattttcactatcttgagtaatgccttgaatgattttttttgcagaaacagaaaaagagcatagcgatatcaatagcaagatgacaatatgatcacctttcaatagggcgctatttggcatgacgatccccttgtttaaataacagtgcgaccaccaaccaaaacacaataaaagtaacaacacttaaaccgatgggttgtgagcgataagcaaagaatgaaactaagaaattaccaaaaatgcttgaatcatccaaaatatggctaagatcccatagtggataaatcaaaaagtcaggtaattcaatatccatttcaataagtagattagctatctcttctactgcttttaatagcaaggaaacggcgaggaaaagcagtaaaaatccggtaataacaaagaatttacgccaagaaatcatttttgatgttagcaaaaataaccatagagttagtcccgctatcaataggccaatgaatacttcaatcaagaaagacaacgcggtttgtgctgtgagagccataatatggcttgataggaaaacaaccacttcgctgccttctctcgcaatggcaatggcgatgatcagtaaaatcccccagacactttgttgttgcgttttttgtgtcaattcgttttcgatattggcttttagtgatttaccttgtttgttcatccaatagaccatctgaacaattaataggcaggcaatgatttccatcataaccataaacagagattgccagatatcttctaaggagctaaataccccataaatgctaagagctaaaagaatagagagtagtattcctactattactcctccccagagatatttcataccttgtttaggggtaggagagcgttttatccatgcataaatgatccctaccaccagcagagcttcaaaactttctcgccaaacaacaaatagaacttgtcccatatttattcagccttttcagtcgcaacgatttcaccttgagggtgagacagatgaaaatcatcaaagaaggtgtaacgtccaggttttagaggcgcaatcacaacgacagaactcgccccaggcgctaatactttttctttacgtaattgagtgctttcaaattcaacggggctactaccggtattgcgaattttgatccgtataggagttttagcaggaacatttaaaactcgagggatcagttccccctctttcatttctaattcaacggtgtatttttctgcggctaaagtagagcttgctatcattaatagcagtaatagcgtgtattgatagagatgtttaatcattgaaatttcacttaacaaaacagaggagatagccctatacacagggctatcaataattaagctaattagtaactgcctttacgaccagtaccgctatagttaaaatcccatgacacttcaaaaggctcgaaccaagcggctacccccgtctctttgtcgatatgacgaccaaaaacgacatctttattgtaagaaggcgggtaaattttataggtaacgttatattggccgttgccatctaattttaggttttcaccataatgaggaccatcactggcgaccatggccataaaagttccctgctgttttttctccggtgcatctaatttagtcacggtatattcaacagtgagataagggatccaatcaccttcagcaaaaccattcggattatcttcaacagcatgaatatctgcttctaaatggatatcagctttatcagcaggtaggtgcttcattgcatgatggccttcctctgtgtccatcgtgataggttgtagatagacaccttgaatttccatgccatttttaatgattggttgacctacgggatactcaagagcgaagacagaagtgggaattaatgataacaacgtgagagcacgcacataacgagagttcatgtttaatccttatatattgaatgataattgttattattcttattaagattaacatgatttatagcaaaaatagcagaaacttatgtaagaaaaatatcgtttaatttgaagtgggaaaggataaaaataagattaactaactcttttttaaaagaaaaaattttgttattaagaaatgatagataaatatactcaataggtttgctttttaatactaagtaaaatcatagtgttaaagagaatagatggaaatcttattaactatctgacaaagataagcaatcactgatttccatattagatcattaaatttgactctgtgcgctccaaaatcttgattgtggcgatttagctaaaactgattgaattgcatcgctcaccacactgccttttttaagacaattgataggttggcggtagaatgctgagcgagatagcaatgtcaactgacaagctttactgactgataagcctgcattatttaatgattgagcgcagaacttcttcttagctactaccaacccttttttacaaaaagatccttcattgcataatgttcaaggctaactgctacaaacatctttttaagtttggcattttcctcatcaagatcttttaatcatttaacatcattggcttccataccaccatactttgatttccaattatagtaacaggcattactgatcccgttttcgcgacaaatatcttcttctttcataccaaaatcagcgagttttaaaaattaacgattcgagtttcagtgaaaaagatttttttcatcatgacttatacaataacctaattatagctgtctcattttaggggaagtggataatctgtgatagatattttaatgtaattttaaaattattctgttaatatcattatagactgaattaaatagagtggttatgtctgacgtaaaatacttaaccttaaaaggtaaaaaaacaaggattaatatcagctaattgttctacagttgattcaattggtaatagatatcaaacagtccataaagatcaaatacaggttttaagtttaaattacacaataagcaggatgcaaaattcagtccaccatccagttttattcattaaaccaattgataagtcatccccgttattaggcgttgccatatctaataatgaattattagatgctaattttgactttttcaggataaaccaatttggtattttagaaaaatattttgaaattaaattgagtaatgcaactattgtggattttacacaatcttcaccagaatcatctaacggatactctatcgtctcccatgaaaaaatattactacgatatgagtctatttcatggaaccatatttgtgctggtacaagtggatattccataaacgagcaaaatattatttgaagattttataagttgctttacgtaggtaatagtatattttttttagatataggagtagtaaaagtgaaaacaatagccctgcgacaaatgatgattcaggtaatctaaacatagccagtaaaaaaaatgcaattacgctatatctgatactatcaagaatcgatacgaaaaaatttttcatcacttaattaccattaattataaattaatccatttattgctcgataaacttcatcaacacttttcttttcagatcctatcatatataaccattttgatatatttggttctactataaaataccccatttctaaattcattaaaacaaggtcataatacagagtaggattgctatagcgtaatctttcctttgcttgagaagccatctctatgatgccataccctcccacaaaagccattgctatatttccaccacctctaattaacttgtgggcaatggcatttcttagtaccgtattatatataagttcagatgcggctgtggctatgtaaacacgaactcctcctgttgttactagtgccccagatgtaaggaatacacctcttaatagggttttaagattattcatttcatcatcgttcagattagtaaaaaggtgttctaagtatcttatgataattgctcttattgggttattacctttaaaagtttccttgaccattaaaaaaaatctatcatcttcatattttatattttatattttatattttatattttatattttatattttatattttcatagacatcttcatagccatcaaaaaaatacgatagattcctaacagatctatcaaaccccaatcccattgtttctacataaccagctgctagttctcttgttgattcaagccctttatctaacactaaagcgactcgatatagagcattattgagttcgtcgttgttgttgttcatatttttaccactttttaatgttatggttattaagtgagttcagatgttattagataactatttttattttagcaaaaaaataacctaatgactcaatgaggcattaattaaattggagcaaaacgacattatctgttttgttttttctgttgaataaaggcgattcgcttttttaaataagcacccttcaatttggattaaaagagcccaattttttgggtgctgttcaacaaggtgggggagttactaacttgtatttatattgaaaaatgcaaaataataccttttgcgaaaaaattcactatagatcctaattaacggttatttaggtcattaaatttgactctgtgcgctccaaaatagcttagattgggtgacagcgcttgaagaagcgataggatcttcattaagcggtgaaggaagaaaagcggttggtgtaacatttaattctttagcaataaggaagagcatatcaacatcaattttacatagcccattctcatagcgtgaaaattgctgttggctaacgccgactctttcagccactgctttagcggataaacgtaagtgttggcgctgttggcgaattttatgtccaataatttgagaaataggataaacttttgacattggtgacctctttcctcctatcaactactgataatatttcattaaatatcaatgttttttaagctgaattttaacgagctcaagctctcctacttgaatgagtcaaattcatactttttgttatcggttagttgagtaaattatttatagtcacaaaattattattgataattaattttttatcctatgttaaaaaaaattactttggcagaatgaaaaacggcatttttttgatagagagtgctatatattgtataaacgcaatttttctacttatatagactcgcatttatgattgagaaggagtaaataagaaaggagaataacaaatgataaacacctctttgactgattacactcaaaaataggcgttatatattatttataacagactatttttgagtttttttgtcaggtcaaatccgcaatcagctttatgtcatcgaatcaactcgattatttttactttatctaaattgataaatttacattcacatcagatagacgatagcgttaagatggttacttataatacatggtgattataagtattacagagtcattatctaattatcgtcaaggtcgagattatgaatgtaaaagagatcattcgtcatgaaccatttggaacattactcggttatgcacctggtggtgttgcgatttactcttcagattacagcagtatagataaagaagattatgccgccaatgattcattccgtagttatattggtaatgagtatatggggcataagtggcaatgtgttgaatttgcacgccgttttctctatttacattacggggttgtttttactgatgtgggaatggcctatgagatcttctcgttacgtttcttacgaagaacgattgatgacgatattttacccttgcaagcttttgcaaatggcagcaaacagccaccgacggtaggagcgttgcttatttggcaagaagggggagagtttaaagtcaccggtcatgtggcggttattaccgaagtattagaagataaaatccgtattgcagaacaaaatgtgatccacactaggttaccgcgaggtcaacaatggacacgagagttaccacttaaagtgagtgataatggctattttatcgaagatacctttgataataccaccttgctaggttggatgatccaaacagaacctaatgcctacagtttacctcaacctaaagttgcccctgaattgttagctattcatgaggccaaattagccaacaaggggcaatttgctggaaaatggctagatgaaagcgatccgttagaaaaagcctatgtgctagcacagcacggtcatacgattaatcaagacagctatgaatatttcaccatttcagaaagtgctgagcatgaacttatacgtgctagcaatgaaatgcatttgatgtatctgcatgcaacggaaaaagtgctgaaagacgataatttactgcgtttatttgcgatccctgaagtgttatggccccgtatccgcctatcatggcaaaatagacgtcatcaaatgatcactggacggttagatttttgtatggatgagcgcggtatcaaggtgtatgaatataacgctgattctgcatcttgccatactgaagccggattaattattgaaaaatgggctaaacagggtggcattaaagcaggttataacccgggtgaacgtctattagatgcgttatcagatgcttggaaacacagtgatgcgaagccatttgtacatattcttcaagatgatgataatgaagaagattatcatgctcgctttatgcaacaagcactgactaaagccggttatagcagcaaaattctgcgtggactaaaagagctgcattggaatagtcgtggtcagttaattgatggtgataaacgtattgttgaatgtgtatggaaaacatgggcttgggaaaccgcgttagatcaactaagagaagagagtgaacaacagtcacttattcctattcgtattggtgatccggcgggagaagttcgtttagttgatgttcttttacgccctgaaatcacggtttttgaacctctttggacacttattccaagtaataaagcgatattacctattttgtggcaacttttcccagataatccttatctacttgatactgagttcactttaaccccacgtttgtcgcagagtggttatgcagttaagcctattgctgggcgctgtggtagtaatattggtttagttgatcaccaagaaaatgtattaggtgaaaccagtggtcaatttgaacatcaagaaaatatttatcaagagttatggtgtttaccaaaagtgtctaaccgatatattcaggtttgtacctttacggtagatggacattatggtggttgttgcttacgctctgatccgacattagtgataaaaaaagacagtgatattgagccattaattgtccttgaagataaacactttttagcggattaatttcatcaccatcatccaatgagtaagagatcggcttagattaaaccgatctcttttttattttgtcagatcacatcccttgtaagatctgttttttcagccattgaataaaaagctgtactttagcgttactcttttcatcgcgggtaaccagataatagcgttgtgcacaaaaaaactcacaattatcaaaagggactattaattcattatttgcgagttgtttttgaattaagcgtttacgccccattgcgacaccggaatgattaacggcagcaataacagctaaatcagagcgatcaaaacaaatattacttttatttggaaataatcctaatcccatatattcactccaagcgcgccattcatcaaaatcagagttattactccaagcttgtctatcatgtaacaaagtacaattagcaaggtgatggatattacctactaattcatggcgagcagcatattcagggctacaaacaggaataattgattctgagattaaatcttcacaatagagatttttcaggtgtttatcatcgaaatagatagcgagatcgataccataaccacgaaaattaatatcgtcattgccagtaagtaagtttaattcaatagaaggatagcgttgagtaaaatcagaaatacgaggtacaagccaacattgcgcaatagaagggcgagaatacaccgttaatacgccagatatttcttgattatagatatctaaaatctcttgattaatatcttcaagtgtttttttcaatgcccaataaatacgttcaccttcttcggttaattcaatacgccgatgaaagcgattaaatagctttatccctaattctttctctagtgtattaatacgatggctaatcgcgctaggcgtcaaggacaattcctctgcggctaaagcgaatgataaatgccgtcctgttgcttcaaaagtgtgaagtcgtgctaattgataactggataagcgcttatttctcaaaatcacgttagaagatccaaacattttttattctcatttaattattattagtaacgtaaggtaataatcaagttaatgttaaggtgaaagatagccaagatgaaatctaaatgataaatatttgtgcatctgatcacctatttggcttaattgaattcatcttagtatctattttcatcatttgtaagtgtcgaatgattaatattcaatatgtttaacaataaataaaaattagggattgatctatggaaccgacactatgggtactaggtactctgattataagtatcttgctcattgtttttactataataaaacttaagtttcatccatttttagcactactacttgccagtttttttgtcggtatggcaatgaaaatgaacccattagaaatggtcagtgcaattgaaaatgggattgggggaacgctgggatttttagccgccattattggtttgggtactattctcggtaaaatgatggaaatatcgggggcggcagagcgcatcggtatcaccttacaaaaatgccgttggttatcaccggatgttattatggtattggtgggactgatttgtggtattaccctgtttgttgaagtaggggtagtgctacttattccattagcattctctattgctaaaaaaacaaacacctcattattaaaactcgccatccctttatgtactgcattaatggccgtgcattgtattgttcctccacaccctgcagcgctttttgtcactaatgagttaggggccgatatgggaacggtgatcgttgccggtcttgctgttggattattagcctcattagtaggcgggcctcttttcttaaaagtattgggtgagcgcttaccttttaaaaccgtaccagaagcattttctgatatggaaattcgtcaagaaaaagatttaccttcacttggggcgacattatttacggttttattacctattgttctgatgctgattaagaccgccgcagagcttaatatggaaaaaggcacttcggtttatattgcattacaatttattggtaacccgattactgcaatgtttattgctgcttttgttgcttactatattttaggtattcgccgtaatatgggcatgagtaccctattgaaaaaaacagaagatagttttagctctattgccaatattttgttaattattggtgctgggggcgcatttaacggcattttaaaagggagtggtttaagcgattcattggcggtgatcctctctaatttggatatgcatcctattttattagcttggctagtagcgattattctgcatgcagcagtaggatcagcaacggttgctatgatgggtgcgaccgctatcgttgcaccattaatgccaatgtatccagatattagccctgaaattattacattggcaattggctctggggctattggctgtacgattgtcactgactccctattttggttagtaaaacagtattgtaatgccacattaagcgaaactttccgtttttatagtatcgcgacctttattgcttcatttgtggcattagggggcacttttatgctttcttttgtcatataaaagagaatgacgatgaccacgatagatataaataaattaaaaaatgattatccactggtacgtgatttagtggatttaaaagaggtggtttggtttaacccaaatgttacctcaactgaccagggacttccttatgtaggtttaacgcaaaatgatgtgatggatgcacaggcaagattacaacgttttgcaccttatttaatgaaagcctttccagaaaccgcatcaactgaggggatcatcgaatcagccgttgtggatatccctcaaatgaaagaggcactagaaaagcgctataacacccttattgagggacaattgcgtttgaaaaaggacagccacttacctatttctggttcaattaaagcgcgcggggggatttatgaagtgctcactcatgctgaaaaattagccatagaggccgggcttctgaccacagaggataattatgaaaaattattttctgatgaattccgcaaattttttagccaatacagtattgccgtcggctccacgggtaacttaggaatgtcgattggcattataagtgcaaaactgggctttagcgttagtgttcatatgtctgcggatgctcgtcaatggaaaaaagacaagctacgcgctcatggtgttaatgttgtggaatatgagcaagattacagtattgcggttgaacaaggacgtaaagaggcagaaaaaaatcctcgttgtttctttattgatgatgaaaattcaaaaacattattcttgggttatgccgtcgctggattacgtttaaaacatcaatttgaaacgcttaatattccggtcgatagtgaacatcctctgtttgtctatctgccatgtggtgtaggcggagggcctggtggtgttgcttttgggttaaaactggcatttggtgatgcagtacattgtctatttgctgagccaacccattctccttgtatgttacttggggtctatacccagttacatgatggtatttctgttcaagaagtgggtatcgacaatattactgcagctgacggtttggcggtaggtagagcctctggctttgttggacgggcaatggagcgtttgattgatggctattacaccattgatgatcaagagttatataacttattgagcttgttaaacaaagaagaagggatccagttagagccttccgctttagcaggaatgacaggggctattcatgtttctcaagctaaagattatctacaaggtttatcacttgatagtcaaaaaatgcacaatgcgacgcatttagtatgggcgacggggggcggtatggtgccaactgatgaaatgcaaaaatatcttgcgcaaggggaatagcaaccatataacaataaaacaaataataacattataaaacaaaaggataagattataagcttatctgtaatatcacttctgtatttacaccaggatgtcacatcaggggaagatgctgtagtttataacgataaaaaaagaggcacccattgggtgcctcactcactaaaataaaagccattattctaagataaacatcccataaggatggatttgtagataatagctatcaccttcattaggttgaagttgggttgcattcacttgtaataacaatgtttgattttgccatgcaacagtcacctcatattgtggtcccatataggcgacatggattattgtacattgctgacaagcttcaccttgttgagataaggtaatagcttcaggtctgacacccactctaatttcggttttgttgctgttaaagttctcggggcgaggtaagcgataattaaaaatatcaacataatcagcccctagagtagcagggaagagattggcatctcccataaaacttgccataaactcagaggccggttggcgatataaagtttgtggtgaacctaattgcattattttgcctttattcatcactaacaccatatcggaaacggcaaaagcttcactttggtcatgggtaacatacagggaggtgatattaaactgttgttgtaattcacgaattttctccctcatgctacggcgcaagttagcatccagattacttaatggctcatcaaataacagcactttgggttttaagatcaaagcacgagctaatgccactcgttgttgctgaccgcctgaaatctgatcgacaaaacgatcttcaaatcctgctaaatctaccaaggctagagcctctgccactcgctgtttgatctctgcctttgggcgacctaacatttttaagccataaccaatgttgtcacctaaagacatatgagggaacagggcgtaagactgaaacaccatacaaatatcacgttgttggattgagcgatcagtaacatcttcaccatcaataaaaattttaccttctgttggtttttctaatccagctactaagcgtagtactgtcgttttaccgcaacctgatggccccaataacgaaaccatttttccttgaggaatagataaactgagagtgtcaattaccgtgtttgtaccaaaacgcttaacaatatttttcagttcaacgaaatgtgattgtgtcatgatttatactccgtattactgtgcatttttggctttagagcgtgaaacacgggcttcgccaatcaaatagtcaaataagaaaataatagccaacatcacgatgattaaaatcgagccataggcaattgcgacgccgtattcaccatcctcaacacgatttaaaatataagcggtagcaacgcgagtttcaggggtgactaagaatacaatcgcactgacggtggttatcgcgcggacaaaactataaattaaagcggataaaatcgcggggcgtaataaaggcaatagcacatacaaaatagttcgcattgaatttgctcttaaacttaatgacgcctcatccaacgatttatcgatttgccctaatcctgcaatacccgctcgtattcccacgggcacgttacgcatggtcattgagataatcacaatggctgccgttcctgttaaataaaacggtgaatcattaaatgccaagatataagagacccccgcaacagtaccgggaacggcaaaacagagcatagtcgtaaattcgatactctttttacctttaaaatcttggcgcacgacaatataggcgatcaaaagccctaaaatagcggtaataggtgctgcgatacccgcataaagtaaggtatcaagtaatgatggccatgcgccatcgctcatcccttgaccaaataatttaataaagttatcaaaggttaaggtgtaatccacaccccagttaaccgtaaaactgccgtagaaaatgctgccatagagtaagatattaaagataacccaaatacccaacacgctagtgacaaaggttactaaggaggtgggtaatggttgaacatcaccacgataggatttacctgacaccgtgacatatgagcgtttgccaatccacatatattgaatgcagaacactaataatgagaataccaacagtgaagcacctaacgtacttgctgcttggtaatcaagttgagagccggtgatatagaaataaatttgagtggcaatcacgtcaaagttgccacctagcaccaatgggttactaaaatcagccaatgattgcactataacgatcaaaaaggcattggctaatgctggttttagtaacggcataaaaacatgaaagaatgtttggtagcgattagctctaagggtataagaagcctcttctaatgacggatggatagttttaattgcaccatctaagatcataaaagacataggggtaaaggcaagtacttgtgcaagccaaattcccgtaaagccatataaccagttggtattttctaaacctgcataagttgccaaaaattcagtgatataacctgaacgtcccatcatcaaggtcacacctaaacccacaacaaaagggggagtgacaataggtaaaatagaaaatactcgaccaataatcgctgatcttactgcaatacgtgatgtataaatggcgaggatcaaaccaaaaaaagtacagccaataccaactgcgatagacagtaagattgaattgatcatcacctgaacaatatgggcttggctgagaatggcaataaattcaaagggggcaaaattgccagcactatcttgaaacatcggaataaagatagcgacacttggaaagataataaaaacaccgattaaggcgacaactgtgattaatgagccaatcacaaagctatcaccccctaaccactctaagcgtgttaaagcatgcttggctatcattcctaatgaaataaatagcacgataaccgaataacccagaccacgaccttccatcgttgcggtaacaatagtgataaaggcgcagaaaaaggcaaaacttgcatcaaaatagtggcgaatacgattttctcgccctacaggatgtaaaggacgaattaatagtatgctgggaagtaaaaaccagagcagactgatatttaagttactccagccataagaggtaagtaattcatctgcggtagaatcaaatagaccataatcaaggctccatgaaggcattaatataaatgccatccatgcaatcaggatccataaaaatatgggatcccacctctttttttcagacaaagcgagtgtgtgagacataaatcccccgacagtaaagctcattattattatgtaaaaaaaagagcgagagcatctctcgccctattgataggctatttacccatttttacttcggtaacccatttatttatcagctctttacgaacatcactatcgccatatttatccatgtcgtagttaatcagttttaagtctgataatttcaaagccatcggggaagactctgccgtggtattggtgagaatttggtaagatttaccctctttccaactaatttcttgtgcttctttagagagtgtccagtctacaaataacttagcgttatccatattacgggcatttttgatgatactgacaccgccaatttcgtaacctgtgccctcacaaggtgagataagctctagtggtgccccgttttcaacttcgagtgaatagtcgtgtaagaagccgataccaatcgcggcctcaccacgggcggcgttacgcgctggtgcaatacctgatttagtatattgagagatattggtatttagttttttcagataatcaaaggcttgctctgttccccataattgatcgaaagttgctaatgcagtgtatgcagtgcctgaactttgtggatcagcgatttgaatttcacctttgtattcaggtttgactaaatctttccaacaggtcggaataggtagacctttctcttttaaacgatctttattgacaccaaaacctagaataccgacataaaccgcagaagagtagtttcctttgcgtttagccggatcacgaaattgtggcatgatctgatcaagattggcggatacataaggctctagcagatccatttcacccgcttgtgagtgaggatccattgttccgccataccaaacatcagcttgtggattgcgtttttctgcttctattttcgctaatgtactgccggagccattacgaacaaaagtggttttaacatcatacttttcagcaaaagctttagtttcagcttcacacatcgcatttgtggcactgcaataaaccactaagcgacccgcagcactggtggataaacttaccgtagaaagagctaagccggcggcaacaagtgtagagagagttttcagtttcatgttcagaaccttttaaatgtgtcgtcatcggaaaatgaaagtgggccaactaaatgctcacgtttactgacatcagcgatcagcaatggcattagtagtagtcccattaaggccgcagcactggttaataatacaaacatcccagtccaaccataatgcgccatgacctgacttaatggccaacctgctattgcagcccctaaataggcatacaatcccaagtagcctgttaccgtacctgctgcgtttttatgacaatattctgtggcagcaagtccgattaacatctgtggtccaaacacaaaaaaaccgatactgaaaaaacaggctgcaagcaatgcataatgatgaattggcattagccaaagtgctgttactgcgataaaaagcccgagtgaaaacagcaatatcattggtgctcgttggccacggaataataaatccgagccccagcctgaacataacgcgcctaacaatccacccatctcaaaaagagaaagaatggcattagcacttaacaagttagcgccatgggtttctgataaccaaatatttccccaatcatttatcgccatacgaatgagataaattaaaatataagaaaaacctagtaaccagatcattcggttaaataagatgctttctttcaaaatggttaacataggggtcgaaggcgatacttgctcttgacgtaattcaaaaatatcgcgccgccatacacctactgtgggtaacccttcttctgctggtgttccttttagttgcatacaaagccataaccccataacaatacctattaggccgggaataactaaggctatttgccaactaaaatgggttgccaaccaagcggttaaaaggggaatactcatcccgccaagattgatggagatattccataatccccaccagaaaccgcgttcattacgtgaataccaatgggtgagtaaccttgcacaagggggccaaccccatccttgaaagaaaccattaagtgcccagactaaaagcaaggcaggaaaggataaacagtaggcaaaaataatattcatcacccctgtcattaccagacctgcgcccataaaccaacggtagccgtattggtcatggaaaataccagagagaaattttgatagaccataagtgagataaaacaggctggctatccagccaatatcacctttatctagatgcagttccgtttgcataacgggcatcacaaaattgacgcttttacgagtcaggtaaaacgtggcatagccaatgatcatcgacaacattaaatttttacgccaaaaatcataggtcttatttattgatgccgaatttttacctaacataacatcctctctgatattgccaatgtaagaaaaatgcagttaaaaagaatgagagaaggttgtagatgactaagactaattcctagttttcacgcttttctattgaatttgtgggtaagttaacaattattttagtaccaagctgactaattacttcccattctccccccaatgcgcagatccgctcttcaatacctcgtagcccaaaaccgttattaggttgtgtaggcaaaatgccaataccattatcatgaacaaccagtcgtaattgtgcttgatgttgagtaagcgaaatgtggatctcactggcgttagcgtgtttgctgatattattgagtagttcttgcactagtcggtagagtgtaaaaataatggtgtcgctttcaggctctgtttcaagagcataatgaaagtgacagtgaataccattttcatgaaatgagaactcatcaattaaatggtgtagtgccttctctaatgacatctcttctaaaataggcggccttagttggcgtagcagttgtcgggtagattgatgtatttgttgggctaatcgctcaatttgctcgcctgactgacgtgttttatcgttatctgcacttctttttactaacattgactgaatttgaatagctgtaatattttgtccaatttcatcatgtaattcacgagcaatggcttttttaacatcttcttcggtatgtactagttgttccatcaacgctcggcgtgcttgtaactcttgctctaaacgtagctgataatgacgtaaattattggcaagttgttgctggcgactaatagctatacctaaaccaataccaattaaggcttgggttgttaaaaacatctctaattcatgcaaatcggcaaaagcaccatttacttgtctagcaaaggtaatcattaaactacctaacaacgcggataatacgcccccttgccaaccataacgataagccataaaaacattaggaataaaaaccagaataactaataagcgttcaatttctggggtaagaaagaattgtgcacttaatccaataagacaaaagagaaatacccacattaataaggaggtacgcaatggtggctcaggggtgatttcggcgattaatactcgactttgtaattcgcgtaaatattcataaagtagaaaaacaaagggagccaataaaataccacctgttattgaggttaaaaatattgcgctggtggacgtcgtgagaaaaaaactgagtaggaaggcttgtaataggctattaaatccgaccgctgcgataagtaaggttaaccgttgccaataaagtgggtaacgccaccagatccgttgtacctctagtgcgactaataagctgattaaaggtgagagataaagagttacatgggtaattaattgctgttgagttagccagtaataaagcccccattcggccaataacatcggcaaccaaaaacgtcgccaaagtaaaataaataatgccagccgtaagccttgaggtaaaaaaagtgcggcttgttgaccattatgactaagataaaaactgatcacccaaagtgacaaccagagtaaagagtaggtcaacaataaaaagagagattgaagaaaaaaacgtgcgcctctttgcatgttagagtgttccggtgattaactgattgtttaatgcaaaatggactaaatcaatggttgtttcacagttcaatttacccagtatattggctcgatgaacatgcaccgttttatgactgagattcagttgtacggcgatagctttaacattaataccttgtactagcagattaaaaatctctctttcgcgaggggttaaactatgtaaagcatcttctttttctggtgtctgtcgaagtgctttcatggcatcagcacagagataacagcccccttgatacacagcacgtactgcttgaacgagctcttgtggaccacagcgcttagttaaatagccatgggcaccggaatctaaagcgctttgtacaaatgcgggggtatcataaatacttaaaataattgtccgaaaatcagggcgtttttgttttaatcgactttgtaattgtaggccactctctccaggcatagagagatccatcaccgccacatcaatattatcatttaataaatagggccaagcttcttggccatttgcgtattcaccgacaatattaatatccggctctagcattagcagttgtgcaaatccagaacgcacaacaatgtgatcatcgatgagagcaacgtttatcatatttttattaggctaagcattgttaggtaatatttatctgttttataacaagctacaggaagttatgcgagaaaaaagggagcaaaaacacgcttttgcgctttgtctctcgcttttagcgtattgaatcgagacaattagcagggcagaattaccccctcacaaacagggaacctccatttgtaagggggataggcagattaagcgacttgaacgggaacggctttagcaatgcgtttcatttcattgtcgccttcaaaataggcaatgttgggtttatggctacgcgcatcgctatctggaatttgcacataagagcaaataattaagcgatcacctacagcagcacggcgagcggctgcgccattgacagaaataataccagaccctctttctgcgcaaatggcataagtagagaaacgttcaccattatcaacgttataaatatcaatggcttcattttcaagaataccagcggcatccataaaatcctgatcaatcgcgcaagagccttcatagtgaagatcagcttgggtgacttttacgcgatgaagtttgccttgtaacatggtgcgtagcattgttgcgtttcctatttttaattattcattagactaagctaacttgttggctatcgattaaacgagtgttacccaaccaagctgccattaaaataacggcacatcggctctcttcgctaagtggtgctagtgtttgtgcatcacaaataaaacattcatcagcacgaaagccttgctgttcaagggttgctttggcagtttgtaatagttggttaacatcaaggtttcccgattttaattgctcggctatctgttgcatagcttgataaagcacaggggcttgttgtttttcattatctgataacaaacgatttcgagagctaaatgccaatcctgttttatcacgcacaatagggactggaataatactgatatcaaaacataaatcactgaccattttttttatgatctgcagttgttgataatctttttcaccaaatagcgcgacatcaggctgtacaaggttgaatagtttacttacaacggttgttacaccgcggaaatgtcctgggcgactagcgccttctaacacagaagaaagtactggaacctcaacaatcgtttggttttccatcccatttgggtacatctctttcgctgatggggcaaagacaatatcaacatgtttatcgcgcagtaactcacaatcttcttgtagggttcgtggatagtttgctaaatcggcttctctatcgaattgcattggattaacaaaaatagaggcgataaccacatcagcatgaatacgcgcttcttctatcagttttaggtgaccttgatgcaggttgcccatggtcggaaccaatgcaatgcgtttaccttcttgttttagtcgcttaatttcgcggcgtaagataagcgttgtttcaataattagcatagcgtgactcctttaaactattttaatgaatttaaatgataaatcagttaaatgagtgttgttcttgagggaacagtttttgttcaacttgttgaacatacagtctgacagcctcgggtaaggagccagcttcttgtaagaaatttttagaaaatttaggggcattaggtgttagacctaataaatcatgcatcacaagaatttgtccatcagtgacattgccggcaccaatgccgataacgggaatattgagtgatccggtaatagtttttgctacggaaacggggacgcattctaatacagctagttgtgctcctgcggcttcaagcgccatagcatcttgcttaagttgctctgcagcagcttcttctcgaccttgtactttatagccaccaaacacattaacagattgaggggttaagcctaagtgaatacaaacaggcactgcgcgttcagtgagcattttgactgtaggaataagccagcttcctccttcaattttgaccatattcgctcccgcttgcattaaaatagctgcgttaagacaggcttgctctggagtggaataagacataaaaggcatatcagcaattaagaaagcgttaggggcgcctgctcttacacaacgggtatgataggcaatttgctcaacggtgacaggtaatgtgctgtcatgaccttgtagtgtcataccgagtgaatcaccaattaacatggcaggaataccttcattggcaaatagacgagcaaagctagcatcataagccgtgatagtggcaaactttttcttttcttgtttatagcgattgagcgtagatagcgtaaccggcttcatgataataaactccatggtgtgttgcgtgtaaattgagttatttatgtcagttaattatttgtttattaaagagaatatggcataaataaaaaacattaactgctgattgtagcatctacgtactaaaaacgaagaaaaagtcgtgaattgaataataaaaaatagaaataaaaaatattttgatatttatccaagaattagaaatggtgatataacaggcgggagggaagggcgtattttatcacttatggggagggataacgcgataaaggaacagtacaagagagttgtgaacggggttgatactgtcagtcaacagcatcaaccattaacatcaaacacgcttattatgtggtatcaccacttttccataccatttttaggtacgagcgctaatctgtctgctaatcgttctccgtcatcagggaaacaaagttcaggtgctaaatccgccaatggataaagcataaattcacgcaccttaagtccataatgaggcacagttaaacgttcggtctgtataacttgatcaccaaataacatgatatctaaatcaagggtacgaggtccccaacggttacctgcttttctttcacgaccatgggcaagttcaattgcttgtgtatggtcgagcaactcttctggggctaaagtagtatcaacggcgacagccatattgagataatcgggttgatcttgaggtcccatagggcgtgtgcgataccaaggtgattgggcaatcagtgtagtattagggatttcactaatcgcttttatcgccgattttacttgctgttctggtgagtttaaattactgcccagaataatatacacacgctgttgttgcttactcatgtttgttctcttgtcttggtgcattattttttgcattagggtgacgaggacgtttacgaggacgtgttcttttgcgtaccgggcctggacctaattcagagaccatagagcgttgttgtgtattgtttgaaatctgaaaatcagcccaccaagcggctaatgcttccagatcaggatttctttgtacattagcgcgtaattccagtagatcaaatgctgcacggaatttaggatgctcaagcagtttattggctcggcgcccttgacgcttaggtaaacgctgctgtaattgccaaatatcacgcatcgtggtggtgatacgtttagggatcgcaatagtacgacattgctcatctaaaatatcattcatcgccattgagaaagcatcgtaataagacagtccactttcttgagccagtttttcggcatgctccactaagggataccatagcattgctgcaaataagaatgccggatttacgcgcatttctttactaatacgatagtcggtattctttagcacctgttcgatcattctttccattggggtatcttgctgctcagtgatccttgaggcaactaatggaaaaagaggctctaaaagttggaaatggcgcattaaccgataggttttataaccatgtcctgtttgtaataatttcagcgattcttcaaataggcgtgctgaaggaatattacgtaatagtggtgctaattggctaattggctctgcagtttccggtgcgatacgcatatccagtttactggcaaagcggatagctcttagcatccgaactggatcttcacgatagcgagtttcaggagagccaattaaacgaatagtacctgatttaagatcagccaagccccccacataatcacgtacagcaaaatcatcgacgccgtaatagagactatttaaggtaaaatcccgacgaatggcatcttcttcaatcgatccgaagatattgtcgcgcagcaacataccgctttgtgcttgttgtgactgattgcgatcggatgtttcatgatcttcatgagagccacggaaagtagcgacttcaatcacttcggggccaaacataatatgcgctagacgaaagcgtcgacctactaagcggctattacgaaataatcgacggacttcttctggcgttgcattggtagcaatatcaaagtcttttggttttttccctaataatagatcgcgtacaccaccacccactaaataagcctgaaagcctgaattattcagacgataaagaacttttagtgcgttatcactgatgtctttacgcgaaatcgggtgttgatctcttgggatcacagtcattggcaaatcactcccgttcgccttttcgttattacttttgttcttacggggacggtctgcggatagggcaggacgccgacgcacagtcgtttgtgtttcttttttaggtcggtcagatgcagtgacaggcctttcactcgctaccgattctgtatctgacgatgttgtttgtcgtcctagcaaattacggcagaaatgcgctactcggttaaaaatatgacacctcgaataattaaatctaataattaaaaaattaagcggctaatcatagcctactgaacattttttgagaatgctttgtgtgggttattgtgcatcttcatcataatgttaacgaataatcttgcctgacagcaacggttgacgaggtaagaaaatgtgctccatcaatattattccttgcttatggccatcagctatagtgatagaattatacgcaaataacttctcttttatgtgaataaacatcgtcatcacagtgcgaatagtctgagttattgtatcaagaagtattaattggaggatgatattattgatgtgaaagcgccaacgctcataatttgtgtcagcttgaagataacgagccaatgctgtaaccaaaccaccaaaacaaagttggtttattaataatggcactaaatgcctaatacacactgtcatcttgggtattaatgtttagattaaagccccagcacctaagtactgaggctatactcattaattagccagccatctgtttttcacggatttcagctaatgttttacagtcgatacagagatcggctgttggacgagcttctaaacggcggatgccgatttcaacaccgcaagactcacaaaagccgaagtcatcatcttcaactttcttcagtgttttctcaattttctttatgagtttacgttcacgatcacggttacgcagctcaagactgaattcttcttcttgtgcagcacggtcaacaggatctgggaagttggccgcctcatcttgcatatgagtgacggtacggttgacttcatccctgagctgattgcgccaagattcaagtattagcttaaaatgcgctaattgggcttcgttcatgtactcttcgcccggtttttcctgatatggctcaacgccagcaatagcgagaatgctcatggacgatgttttacgcttttgcccttcttgcataatgcttctcctacatacgcattttctgaataatcccccaccttaaataggaagggaaaaaaatagggcgctataaatagcagatgcccgcgcggatagcaattattcctttaataagttttctcatgatgtgaaggcacgcaagtaaaaaggccattttagttaaaaaatacttaaccaacaccatgaaaatgtattaaccttttgaaataaaaggtaattgctttccaattgttaaatcgtactcactaatattgatgcgataacataaaatttcaaccccagcatcacatgcttgttttagcaataagtcatacttagggtcaatctctttagcaacagacacttgtgtaatgccagtatgggggacagcgtaaaataagatagcccttaagcccgattttgcgatagcggtcaactctcgaaggtgcttttgacctcgctctgttttagcgtcaggaaaatagcccattccagcatctaataaagtgaccgatttcacttcaatatagcagtcaactttatgatttgacttaagtaaaatatcaatacggctattctcactaccatacttcacttcgcgtcttatctcatcatagtcagataattctggaatatcgccagcttctatcgcatcggcaatgatcgtattagctcttaaggtattaatacagatccaatcacctgattgagtttgggttaattcccaactatgaggatattttcttttgacattcgatgacgtggaataccaaaccgtatcacctggagttgcgcatcccgtcatcgcacccgtattagcacaatggagcgtgaattcttcaccatttgccgtcactacgtctgctaaaaaacgtttgtatcgttttaataaagtggcagattgtagtggttgttcaaatttcataatcaccctggtgaaaatacgtcctttaataaagggctaatgctacaatgagccacagagaaagttaatcagttatggagcttgtgtgcatctattgccaatttttgaggtagcaggatctgttgttactgcattaaaacaatgtccccaagtcttacttcacgcccccacaggggcgggaaaatcaaccgcactgccactgtatttgcttcaacaaaatatatttgatggcaaaattattttattagagccaaggcgtattgcggcaaaaagcatcgcttatcgtttagcaagtcaactcaatgaagaggtgggtaaaacggtggggtatcgcatgcgtgctgaaagtaaagtgagtcagcagacgcgccttgaagtgatcaccgaaggggtgttgacacgtatgttacagcaagatcctgaactgacaggtgtaagtttagtgatacttgatgaatttcatgagcggagtttgcaagcagatttagcattagcactgctattagatgtgcaatcaggattacgtgatgatttacgccttttggtgatgtctgcaacattagataatcaaaaattaacttcactattgccggatgcgccgatgattagctctgaagggcgtagttatcctgtttcacggcactattatcctattcaatcacacctgccttttgaacaagaagttgccacgatggcgcgacgtttgcttacacaagagacgggctctttacttgtttttttgcccggtagtgcagaaattattagagtcgcgcaattattagctgacaaagtggataaacataccttaatttttccactttatggggcactttcattagcacaacagcaacaggccatagagcctgtagaaaagggatatcgcaaagttgtattagcaacaaatattgcagaaaccagtttaacaatcgaaggtattcgcttggtgctcgacagtaccattgaaaaacgtgcccagtttgatttaaaaagtggtgtaacaagcttattgcgccaacgaataagtcaagcttcacaaacgcaaagagcggggcgggcaggacgtcttgaagccggaatttgttggcacttaatcagtcaggaacaagctgagcgcggggcaactcaccaagtacctgaaattttatctagtgatctctcttcgttatggctttcaatattgcaatggggatgtcgtgatataaaccaactctcttggttagatacacctacaccagcagcaataaacgcagctaaaacattattgcaacgattaggtgccattgataatcaagggggattaacctcgcggggagtacgtatggcacagtggggcatcgatccccgattggcggcaatattagattatgctagtgaaaaaagtgagcatcatcttgctaccgcagcaaggctgtgtgccattttagaacagccaccaagagacagagagattaatcttgaatggctgatccaacagaaaaatcatcaatggtcacagcgtgaaaaacagctattacagcaatgcaaagggcaatgtcgcccagaattattagcatcactattgagtgtcggatttgcagatagaatagccaaaaaccgtgataatcaaggtcgatttcgtctcgctaatgggcaaggcgcaatgatggataatactcaaccaatgagccaatcgccgtggattttagcaccattgttgttgcaaaatgcacattatgcggatgtgcgaattttattagccttacctattgatattaatgaagtatcctctatctttccggaattgatacaagataataccaccgttgaatgggatgaaaagcgcggtacacttcttgcgtggcaacagcgccaattaggtcagttaaccgttagccaaatgccattagataaacctaataaagcgcaaatgcaaacggcattattaaattggttacgtaaacaaggattaagtgctctacccttaagtgaagagagcaagcaactgtttattcgccttgctttagcgcaaaagtggtgccctgaggccaatttacctgtattgaatgaagccgttttattagactcattagaattgtggttacaacctgaattaggcgatacccaatcacttaaggcactgctacaaatggatattaatgggataattaaaaatcagttaacttggcatgagcaacaattattgcaagagctgttcccaacacactatattgctccaacgggcactaaagtgatgattaggtatgatttagataatccgccgattattgctatcaggatccaagaggtttatggtgaaaaacaaagtcctattgtggcaaaagggcaattacctgtagtgatggagttactttctccggctatgcgacctatccaaaaaacacaagatctcgctactttttgggccggaagctatacacaagtacaaaaagagatgaaggggcgatatcccaaacatttgtggccagattcacccgcaacaacggcccccactcgacgtgtaaaaaaatggagttagcgcgtatttatacgtgctgaataacaatttgagagctttcctgtgggatagcttggaaaaatagcgacaatgttaggcttctttaccctaagggtgtggtgaagaggttttaatgagagaaactgttcatgagtagaaagaaaaaaccagtaaagaaaaccaatagaaggcgttcttggttttggttatttgttaaaatcgccattgtggttgcggttttagtcggcatctatggtgtttatttatattcccaaattaaagagcgccttgacggtaatgtatgggaattgcctgctgccgtttatggacgtactgtcaatttagaacctggcatgaactatagccaaaaagagatggtaagtttactggaaggtatgcagtatcgccatgtcaataaaatcacccgtcctggggaatttgtcgttaaaaatggcactatagagatgttacgtcgaccgtttgattttccagatggtcgcgaagagcaaattttagcgaaattgacctttgaacaaaactcattggtgagtatcaccaatatgaataatcagcgtcaatttggtttcttccgcctcgatcctaagcttatcactatgatgcaatcggctaatggtgaacagcgtctattcttagcaagagataaatttcctcaactattagtcgatacattaattgctacggaagatcgccgtttttatgagcatgatggcatcagtatttattctattggtcgtgcggtgttagcgaactttaccgcaggtagagcggtacaagggggaagtactttaacgcagcaattagtaaagaacttattcctaaccaatgaaagaacgctaaaaagaaagcttaatgaagcctatatggcgattattatggatgcgagctatagcaaagatcgtattttagagctgtatcttaatgaggtgttcttagggcaaagtggtgatgagcaaattcgtggtttcccactggctagcctttactattttggtcgacctgttgatgaactaagtcttgatcaacaagcattattggttggaatggtgaaaggggcttctgcatacaatccatggcgcaatcctaaggctgcattagagcgccgtaatgtggtactaaaattattacagacccaacaaattatcgatcaagagctttatgatgtattaagcgcacgtcctttaggagtaaaacctcgtagcgaagcgctaacgccacaaccggcatttatgcagttagttcgtcaagagctacaaactaaattaggtgatcaggttaaagatttatcggggactaaaatttttacaacgcttgatcctgtttcacaagatgcagcggaaaaagcggtagaagcgggagttgctgatttacgtaaaacacgcaaaatcaacgatctcgaaggcgcgatggtcgttgtagatcgcctcagtggtgaggttagggcgttagtgggcggttcacaaccacaatatgccggttttaatcgtgccatgtccgctcgtcgttcaattggctcattagcaaaaccggcaacttatttaaccgcattaagtgagcctgagcgttttcgtttaaatacctggttggcggatgaacctatttcagtgcctattccgggaggaaaaccatggcaaccacgtaactacgatcgtggttataaagggcgattaatgttggtggatgctcttgctacatcacgtaatgtaccaacggttaatcttggtttagaagtcgggttagaccaagtgatcaaaacgtggatcaaactaggtgcccctgcagaaaatttagaaaaagtaccagcgatgttacttggcgcactaaacttaactccaatggaagtggcgcaaactttccaaacaatcggaagtttaggtaatcgcgctaaattatcggcattgcgctccgttatcaaccaagatggtacggtgctttatcaaagctacccgcaagcagaaacaacggtttctccacaagcagcatatatgacactgtttggtatgcaacaggtggttaattcaggtacagcagcacgagcattaaaacctaaatttggtcaatataaccttgcaggtaaaaccggaaccaccaacgacttacgtgatagctggtttgcgggtattgatggtaaagaagttactattgcatggatgggacgtgataataatggcccaactaacttaacaggatcgacaggggcattgatcctttatcgtcattatttagaaaatcaaacaccattaacattaaatccacctgtaccagaagatatagcacagatgtcgattaatgctgaaggtaactttgtttgttatggtggcggcgtgcgtacattacctgtgtggacagcagatcctgatagcctctgtacaccgttaccacaagagagcgacggcgacgatagtgcggcacctaaatggttacgcgatctgttttctgagtaattattcgcaatactattgagataaaaaatatcctcctgcaatcgcggaggatatttttttgccagcaataccagcaataaatgctatttaagtaatgaaagattacgctttcattttgctaaaggcgtattcagccgcatcgatagtacgttgaatatcttctttgctatgagcaatagacataaagccagcttcaaaagccgacggagcgaggtaaatacgtttttctaacattaagtggaagaactgtttgaagcgttcgacatcgcagttcattacgtcttgatagcaagtcacttctttggcatcggtaaagaataaaccaaacataccgcctacatggtttactaccatagggatacctgcttgttgtgctttttcaagtaagccatccgctaacatagtagtaagttcatccagtgtttggtgaactcccggttgtgaaacttcttgcaaacaagctagacccgccgccatcgcaatggggttacccgataatgttcccgcttggtagacaggaccgataggggctaattgagacatcacttctttatgtccgccgaaggcgcctacaggcatgccaccacctataattttacctaaacaggtcaagtcaggatcaacatcgtaataagcttgtgcgccgcctaatgcgacacgaaaacctgtcattacttcatcaataatcagtaatgcaccaaattcatcacataatgcacgtaatcccggtagaaaatcggctttaggtggaacacagttcatattaccggcaacgggttcaacaataatacaggcgatttcttccggataattttcaaatgcttgacgtactgaatttaaatcgttgtaagtacaagttaaagtgtgtttaacaaaatcagcaggaacacctggagagtttggttgtcccatcgtcaatgcaccagagcctgctttgactaataagcagtctgcatgtccatggtaacagccttcaaatttaatgattttgtcacgaccggtgtagccacgagcaagacgaatggcactcatggtggcttctgtacctgagttcaccatacgaaccatatccatcgaaggcactaactcagtgactaaatttgccatttccacttcagcagccgtaggagcaccaaagcttaggcctttttgcaccgcatcagttacagcgtggcgaatagcggggtgattgtggcctaataccatcggtccccatgaaccgacatagtcaagataagcacgtccatcggcatcataaatatacgcaccattagcacgttcaataaaaagcggtgtgccaccaacaccgttaaatgctctaaccggtgaattgacgccaccaggtatcacttgttgtgcgagattataaagcgtttcagacttgctcatgtcagactcctaatgatgggtgagcgtaagattaacgcctattctaaagcacagtgcagatgaagccaaatacacgacaacaacattttgatttatcattgttattgttcgagttggcactcattaataaagaaaagttgtgtatcaaaaagtgcattttgtccacaacaaacttgaaggttaagagcaggtattagataatcatcacattatatcagcaagaagcatcaatttttgctggctgttttttactggattatccagtctggagtgaacaatgagtgatgatatggctctgccgttacaatttacagatgcggctgcaaataaagtaaaagatctaattgcggatgaagaaaacccaaatctgcgtctacgtgtttatatcaccggtggtggctgtagcggattccagtatggttttacctttgatgatgctatgaatgaaggtgatatgaccatagaaaaacaaggcgttgccttagttattgatccaatgagcttgcagtatttagtgggtggctgtgttgattatactgaaggccttgagggctcacgttttatcgtcaccaatcctaatgcgaaaagcacttgtggttgtggttcatcgtttagtatctgatttttatattatttgacgtcgtggctacactgccgtgccacggcgttagcaatccccacatctttctatatgctccgctcactgcacgttattggttgtgttgcagtattttttgtcactgttatttttgcttatcgagtgaataacttaataccgtccttttaaatcttcattaataatgactccggcttttcttctaatttaatattctttaagttttattatttgatactccatttatggctattattttataaaatcactatttttaactatataagtttatatttagaataatcatctaaaataaatcaatttactggtgcgagttttttaaccattttgaataaaaataagaggttacttattattaacaaaatttggtatttttcttcttgtaaatcaacaaggttacattttgttacaaaatacacattttgttacaaagtttaaatctatgtacattagtgcagtctggcttttattgatttattttcgaatatgaaagagaaaatgcatatttttttatacagatatagtaatacgaaagtagaaaatatcgactttgcaattattttacgctaagtcacttatgctatggagataaaacctgccttggtctccctctttgctttacattccttaaattttacttaagctattcttattaaatcgcagtgtgcacaggccgattttttgaaaaggatatcaacaataatagtgttgttgagaaacaatgatttactgttaatgaaggatttattatgccaactccatgctatctctctattgagggaaaaacccaaggtaatattactgaaggagcattcactgctgaatcagttggaaatatttatgttcaaggtcatgaaaatgagatgcttattcaggcattttctcatgtagttactgtgccgacagatccacaatcagggcaacctgcgggtcaacgtgctcataaacctttccggtttacggtagcgttaaacaaagctgttcctctgttatataacgcattagcatcaggagaaatgttacctaaagttgatttaaaatggtatcgcacctctgttgagggtaagcaagagcatttctttaccaccacactaacagatgcgaccattgtgaatatcgattgccaaatgcctcactgtcaagatcctaccaaatcagattttactcagctcatcgaggtcgctttatcttatcgcaaaattgattgggaacacacaattgcgggtacttctggtgctgatgattggcgagcacctcttgaaggttaatctcttatgatttatgggctctatattgagcccatatttataaaaatagataaagtatttagcttgctttctatctattttataagtgtttgccgcaataaatggagttgctatgtcaacagatgaagcaaataacacaccaaaacctcgtttaatattagatgaaccagttttatcccattcttctggaataatgatctcagcagcagagcaacgtgctcgtatacaaagacatgtcgaacttcttgatatgttagaacaagggttactgaaaacgggtttagtttttacttgccaagtagctggattagctgacgatacttttcaagtcactcaatttgatttaaacgaaggactttctgagctatttacactcactattcaagtcgtgagtactcaaagtgatattgatttttcatattatttgggaggggcatcatcacttacagtaagaagaaacggtaaaaaaattcgtacggtacaaggtctattatcgagtgcagaacaaagtaatactgatggtattaaaacttggtatcagttagagatccgtcctgaaatgtgggtgatgacacttaatcaagatagtcgcatttttcagcataaaacagtacctgaaatcttaaaacatttacttgatgaagcacatatcaaatatgataacaggctctaccaacctgaacttcatcaacctcgtcattatgttactcaaaaacgtgaatcagcttatgatttttggtgtcgtttagcttttgaagagggaattaacttttggtttgaggaaggcccgaagcttttttacagcgataatcatttaggcatgacggcggggatcactttaacttataacccacagtctgaaacagatattaccgacagtactgcaacgaaatggcgttatatagaacgtttatgcagtgatgtccgtatagataaagactataaccaaatacgtccttcctaccccttatcgcaacaaacaacagggaaaaatcatcaacaacaccctatatttgaaagttatggtcgctttcaagaagatgcacagggccagccatttaatcaactgcgttatgaacaatctcaaaaccatcgtcaaacgggctatgcacaaactaattgttttgctcttatgcctggtaagatatttaccttaactaatcatccgtgtacaagaatgaatgaatgttggcaagtagttagcgttactcatcatggtgtacagcctttaggagataacagtgaaggacaaggcactcaactttctaatcacgttacctttattccgagtatgcaagagtggcgaccaccatttcattataaaccattagctgatggtgatgaattagctacagttgttggtccagatggagaagaaatttataccaatgaacaaggtgctgtaaaagtttattttcattgggatagaagaggaacacctgatcatagtggatcgtgctggcttcgggttgcgcagggatggagtggcaatggttttggctttatagctatcccgcgtgtagggcaggaagtgattgtttcctatttaaatggcgatattgacagacctattattacgggatgtacttacaatggtcgtaatacaccaccgcttgatttaccgaaagaaaaaaccaaaaccacatttcgtagtaaaactcataaaggtactggatttaatgaactaagatttgaagatgcgggtggccgtgaagaagtgtatttgcatgcacaaaatgatttaaatattcatgtgcaacatgatagtcattggcataccgaacatgatgttaggcaacggatagataatcaaagagtaactgaaatagctggtgatgagcattttattttgaagggaacacaaaaatcattaattgaaggtaatgtttcattacaaatcaaaggcgcgaagcattgcaaagtaaatgatgcattaatagctgaaagcggtaaggaaactcattttaaaagtggtggaaaaattattcttgaagctgtaagcgaaattaccttaaaagtaggaagtagttttatccgccttaccccaaatgcaatctttacttctggaaatttagatattggatcaagtggaccaggaataggtcaagatcctaacattcaactacctgatggtgtcactccttttgaacaacccctttttgcgattaaaaaatattgtgttttaacagcaaatgaagcaggtagtttattaataaagccagctaaggacgaaaattaatgatacctttaacatggatgcaatggagtgataatatttcgcaaggagatatttatttttttatcaattcaacatttgtattagatactattaattttttttatagtaatgattggattgaagaagctattcctttatacaatagagaaactagactttctcatttagaagacataagcccttggttaattaaaataaaatctctatcaaggtatagcttagcaaaaaaaatagatgaatttttgatggaaaagtataattggggttgggtatatcatagtgaattgaattgggatgttcaaattacgcattggaaaaaccatcaaatagttatagttaataatgaagaagtccatttgagactatttgatccaagagtagcaggaatattattccctcatttaaaaaaagaagattggttttcattaatgtatccagttaataatgcatatattccatttgataatgagaatttattttttgaaaaaccaaaagagatattaaaagtacagaaagaaatttcaccatctatttatacacttcctagctatcttttagatgcttggcgtcattcaacacatatgattaatttagttgttgagaatcttattctcaacttttgggaagaaaatggtgagcttgcttattctcttttttcacgagaaaaagatattaaggaggttatttataaatgggttaataaagaaagattaagacatactgatattgcttatttaaataataaaaatttattaagttatttattagatgtaaatctaatcaaaaaggacgaaatataaatgacggataaagcagattgtatatcttgtggtaaaaaatgggttgaaatttatcttgtagatgagtttaatcagcctgtttttgatattgaatatgaattattccaagtctttggtcctatgactgaaccaagaaaaggaaaagtaaaatctgatggtataataatagaagatgaattgtttgatattccaattacgcttagattagatactcaatcgttaatagaaaaaatgagtgaaagaaagctaagaaaattaagaggagaagataattctattgttaagtcaaaagcaatagaaatgaatcgtagctatcgctatacaacaataggaccattatgcaaagataaaattgatattgataataaagaatatcaagataaatatcctttttatcattttcctgagcaagaagcatttaaaggattaacattatcaaagctaaatactgtctatgtaattgagatttgtccatttagagtttggtcattgattttgcaccatacagaacagtattctatgattaatgcttataatttaggtcttttaagtcaattaatttacaataatgataatttatatgatccaaattcagtcagaaacttttttgagcgacaatgctttgatctaagtcgctaccctgtggtcagagaaaaaaatattaaagcagaatatcctgctattgttattgatgtaccttttgatgaacgttatgataaagcgatatttttagatactgaagataaagtgcagcatggatcttatgctgaaggaagtactcaattattctatattcagaataaagaacaatttattattgcttggcgaggctctcaggaaggtactgattgggttgatgattttacttatcgttctaaagatataaaaacccatgcctccgaatttaagatagatggtaaaatacataaaggtttcttagacgcttatcaattagggaaaaaattctttcctgagagattttctgaaatgaaaaaaatgtcaagagaaagaaagttgtttatctgtggacatagcttaggaggagctttagctttggctcatgctacagaattgagtgtaaataaaccattgctttatacttatggagccccgagactatttactatctctgcactcaaacagctacaaaaatttactcattatcgtcatataaataacaatgatattgtctctagagtaccaccagaagcaagcttagataattggttatttaatatctatgggatttttggcactatattgggtggcgctatatcaattgttgatttacttggacagaaaatgattactcaatatggtgaatattatttgcaccatggtaatccagttatattttatgaagtatgtaatttaattgagtattatgatgaaaaaatacccaatgcaactcatacatggcattatagttattttaatgatcgtaataataaaactaagctttatattgtacctgagattaataaaaaaatattaaataaatcatttgaaaaagaaaaagaatttataagcaatttaagtgaagaagataagaaagcgatttttcctgaacaaaaaaatccagaaggtaatggtggtactagtgtaacagatcattatatgggcagaggctatttgccttttttacatgatcaattattagagttaattgatcatgataaaacacctaagcgtttaaaatctcgcgaaaggtttaaagtagctcttgaaaataatactaatattattaatcctgatttgtatagaaaaaaaacattagaagcatatcgtcagcgtaatttatattttttagatttgcaaaatagcatgggaaattcacttattccaatgcaagaaaacccaaaagaagttgatatgttacagcaatttaaggagcaaacatatgagatatttaatcaataattgtccacttattattttagggagcgttgttttactattatcaggttgtcattcactaacttctaagatagatacaacatttttgcccccagaaaatggtagaacagttaaaatttcggttgatgtgccggatatggctgaattattgccaatgaaagtcatgtatcgttcaaatctttgccaaaaaacatatcataataatgaagtacctaaatatacagtacccggttttaatagtgagataatagcattagaaaaaagagagaatagctcattatatagtacagagatcccttataggggaggcggaaaatgtgattggcaattaagtaatgttacattaagattgacattaaaaaagaataattcttttactaaagatattgttgatatagtaggaaccggagtaattattatttttgataataatcaacctcaacaaactggtcataaaccaattaaaataaagggtagttttgatatagtagagcattatttcccgtgggtaagtgattcatttaaaaatagtaatgatattagcttatggttatatggaaaagaacttttcctttattaccaatctcgtgatgctcaacaaataacatggaagcccatcattcatagtgatattgtggtttattctgaatatccagcagaggaaaaaacagaaggtgtaagtacaatctattcttatccagatggtacaaaaagtgcaaatagggatgggaagcctgattacaaaaaactactctctttaattaattcgtcatcgtaataattaaaataaccatactagcacaatacaagggtaaaatattcttttaaaaagatactataaataccggaagaactgtgttaattggtttttttgattgattaacacgacgataaagttatttgtttagatgatgaagtgaactgttcttatagttacatattagtcactatggaataaaaaatgaatattattaataaatattgtctttttttactatcagtagtggagatattactattatcaggttgtcattcactaagttctaagatagatacaacattttctcccccagaaaatggtagaacagttaaaatttcggttgatgtgccggatatggctgaactatcaccaatgaaagtcatgtatcgttcaaatctttgccaaaaaacatatcataataatgaagtacctaaatatacagtacctggttttaatagtgagataatagcattagaaaaaagagagaatagctcattatatagtacagagatcccttataggggaggcggaaaatgtgattggcaattaagtaatgttacattaagattgacattaaaaaagaataattcttttactaaagatattgttgatatagtaggaaccggagtaattattatttttgataataatcaacctcaaagaagtgggggaagagcaataaataaaaaaggagattttgatattgtttctgattattttccttggataaatagatcatttaaaaatagtaatgatattagcttatggttatatggaaaagaacttttcctttattaccaatctcgtgatgctcaacaaataacatggaagcccatcattcataatgatattgtggtttattctgaatatccagcagaggaaaaaacagaaggtgtaagtacaatctattcttatccagatggtacaaaaagtgcaaatagggatgggaagcctgattacaaaaaactactctctttaattaagccgtcatcgtaataattaataaaaaacagactagactaatattattgattttacttattattatctttaatagcctcacaaatctgttgagccgcataaataatacgtggtgctggtctgctaaaactatcttcatcaatagcgataataggaatatctagttgaggttgccaaaattgttgtattgcggcaatttggtttggtttaccactaaataaaatcaaatcaggttttttactgatcacttgctcgcggctgacttgtggccaaggaactgcactattcgcaaaaatattttctccgccacaaagttcggtaatctcattttgtaatgaatgttttgatgtcgtaaataggggttgcataccaaattgaataaagacttttttcttcgcttgatgaggcgtcgttgaggcgtacttttgctgtaattcttgatattgctgacgtaatttttgtgcacttgctaaagcgacttcaggatgagtgctataagaagaaagtcgggtaagatcgtcaatgatttcttcgatactgtgtggatcagagtaaataatagggatacccaatgattttaactgatcgagcggtcgttgaggattaccgcttggccatgcaataattaaatcaggttttaatagcaaaatgcgttctacattaatgccttgccagtcggcaacttgtacgagatcttttgctgcttgtggataatcagaataagcgctcgccgcaaccatattctctcccatacctgcggcataagccatttccgtggcagacggggataaagtaataacacgttgtgcgggagtggctgcgataacataacaaggtgtcaatatcaggcttagcagcagtgcaaaagtgtttaagaaacgcatttttctcgtctttatagtcaaatatacccgtctatttttatcttacctgctgagctaaaagagagacgggtttgttaagcggcttatcgattaaataaattaaaactgagtctctgtttttaatttatcaagcatagtagtgaccattaagcttgattgttgtgcggcaacagataaaaactcatcaaaacttaaatgcgattctttatctgccacatctgaaatggcacgaacaacaacaaaaggtgtatcaaattgatggcaaacatgtccaatagcggttgattccatctcaacagcgacgacttctggaaaagtacgacgaatacgtgctaatggctcggcaccattaataaaagcatcgccactacagattaatccacgcacggcatttaattttagtgatccaatacactcttgagcaatattgaccagtttgggatcggcaataaatgccggcgggcattgtgccatttgtcctggttcataaccgaaagcagtaacgtcggcatcgtgataacgtacttctgttgatacgacaatatcgccaacatttaattttgcatctaacccacctgcagagccggtgttgatcacaacatcagggcgaaaatgttcaagtaatagtgtggtaccgatggcggctgccactttaccaatgcctgattttagtaatgcaacatctacaccattgattttgccagtataaatttcacaaccaccacgagagactatttcgcagttttcaatttgttcacgcagaagtttgacttcttgttccattgcacctattacgccaactctcattgtgtcatactcccttgtaggttaataatatatagcgttaaccaagagtttatcatttatcgcaaaaacacgatataacgcagcgaattcgtttcatcgataccagaaagaggatagaaatgatcgattttaaactgaagttaaattatcaacgcaaatataacagcagtgatatcgatattgatgatgaaatgcagatctcgcgccaatttgaaagcgatcgcgggcgtattattaattcagcggcgatccgtcggttacaacaaaaaacacaggtatttccattagagcaaaattcggcggtacgaagtcgattaacccattcgctggaagtacaacaaataggccgttatatcgctaagcaaataatcggcgaactaaaaaagcataataaattagaagaatatggcttaaatgaacggattgatagcgttgaaagtttaattgaaatggcgtgtttaatgcacgatattggcaatcctccttttggtcattttggtgaagctgcaattaaacattggtttcgtaaggtgttagcacctgatgcttccatagaatttgataattgtccttttttacctattcgctattcagcagaccgacatttaaatgaattaaaacagactttgcgtcaagacttatgccatttcgaaggcaatgctcaggcaattcgcatggcgcatcacttgttaaaactcaatttaacctatgcgcaaattggctgtgttttaaaatatacacgtccagcttattggcaaggtgctacgccgaaagaatttagctatttaatgaaaaaaccaggttattactggtctgaagctgaatttgttaaagaagtgcaagaaaaacttgcaatgaaagatttttgtcgttttccactgacttatattatggaagcggcagatgatatttcttattgtattgctgatttagatgatgcggtagaaaaaggcatttttgatatcaatcgcttagtgcagttattaaaaaatgcatggagtgaaagtggtgcggtaacagaaggtgatctgtttgatatcactgttaatcgagcttttaaaaaagtggatcaaaatgaagctaagcgtagcatgcaagatcaattttttatgtatttgcgcgtctatattaccggaaaattagtaccttacaccgcctatcgctttatcaaaaacttacctcaagtttatgaaggcaactttaaccatgctttactggaaggaaagagtgctgaacatcgtttattgacaacgttaaaacgagtggcgcaaaagtgggtatttagtcaccccgaagttgaagagcttgaaatgaagggctatcgagtgatcagtgggttattggatatttataagccattgcttttattatcgaccgatgattttctaagactacataaatataatgaacatcctcattatgttattgagacgcgtttatatcataagctttcgattaaacataagcttgcttataatgaagcattagaaaaaatttacgatattaatagtgaagagggaaaaaccttagagttttattatcgtacaagattgatacaagattatatcagtggtatgaccgaccattatgcatatgaagaatatagaaaattaatggtatgtgattaatgtgtaatcgattgaaatatctatcatattgattaatgataatttttagatttttcttagagatagttacgcgttattaaaataacagaaaatatttgttattaattgtaagtatattcaatgtaaacgttatatataatagtttttagttatagaataatattaaatctatataaaagagtacttctacttgttagcataaaaatatttttcgatttcataaaaatattgcttatatcagttaagtaaataacttgttcgatggtatactctcctcatatcttattctaaatggtctagtaaacacttaattctgtttgcggagtgaaaatgtcaaactaggctgttttagagttaatccgcaatagattcataaaatttaatactatggtgcagttttattcccctaaaaaacgtcctgctaaaaaacaggtaaaaaacttggcggtaaccgctaatgcattggatgctaacggtcaaggtattgctcatgctgagggcaaaaccatttttgttaaaggattacttccacaagaaactgcacgcattcgtttgaccgaagaaaaacgccagtttgccaagggagaagtgatcacacgattaaccacaaacccagaaagagtgacaccaccctgtcagtactatcaacattgtggtgggtgccagcaacaacatgtgcctattgattggcaacgtaccactaaagctgaggttttatcacatcttattaaacgtgaaactaatgtagtcatttcagcacagcctgttattgccggtgcggagtatggctatcggcgccgagcaagattagggttacgttatcaccctaaaaagggtttggtaatgggatttcgccaagcactttctaatgacttagtgatggtcacccaatgcccagtattaaaaccacaacttaatgtactgttattgccactgtggcagtgtttaaagcaactctctgtcgtgcgtgatttaggtcatgtggaattagtgttagcagataatgggccattagtgattttgcgtcatttatcaccgctatctgagggtgataagcaattgttagatgatttttctcatcacgctcaagtgatgatatatctggcgggtgataatggtgagatcgcacaattaacaacgattgagaaggaacccttctatcagatagagggtctaaaattacactttgcaccaacggattttattcaagttaatgatgaaataaatcataagatggttgctcaagcgatagcatggctcgatttatcgccaaacgatcgcgtactagacttgttttgtggcatgggtaacttcacattacctatggcaaagcgtgttgataaagtcgttggggtcgaaggtgttcctgcactggtggcgatggcgaaaaaaaatgctgaacttaatcaattagataatgttcagttttggcatgctgatttatccgccgatttttctgctatgccttgggcacaggaaggatttaataaagttctgctagatcccgcaagagcgggagctgcacaagtgatgtcacatattgtgacgttatccgcagaaaaaattgtgtatgtttcctgtaatccgaccacgttagccagagatagtaagatattattagattccggatatcagctaacccagttaagaatgttggatatgtttccacaaacagggcatctggaatcaatggcattgtttattcgcaaataaacagatagccactcaataagtcgcagataagatttatatcgagtagggagagaatatggttgcagttagaagtgctcacttaacacctgcaggggagtttgccgttgataaatgggttaatagcttgaatttaactcatgcgaatgcggggagtgaaatcatgcaaacctgggaatactgtcatcgtactgttctgggccgtgaagatgcgcaactgttgctatggcgcggtgttgagatggttgaacttctttcgacactcagtatggataaagatagcatgagggcagcacttctcttcccacttgctgaagaagatcttattaaccaggaagttatcactgaacattttggtgaggcgatatggaatttagtgcgtggcgtaatggagatggatgctattcgccagcttaaagcgacacataccaacgaaactagctcagtacaagtcgataatgtacgccgtatgttattgtctatggtagaagattttcgttgtgtagttattaaactcgcagagcggattgcccatttacgtgaagtgaaagatgccactgaggatgaacgagtcttagcggcaaaagagtgttttaatatctatgcaccattagccaatcgattggggattggacaattaaaatgggagcttgaagatttctgtttccgttatcttcatcctgatgaatataagcaaattgcaaatttactgcatgaacgccgtattgatcgcgaacagtatattgataatttcgtcagtacggtgcgtggttatatgcagcaagagaatattgaagtcgatatctacggacgtcccaagcacatctatagtatttggcgaaaaatgaagaaaaaaaatctcgcctttgatgagctatttgatgttcgtgcggtacgtattgttgtcgaacgcctacaagattgttatgccgctttaggtattgtacatactcattttcgtcatttacccgatgaatttgatgattatgttgccaatccaaaaccaaatggttaccaatctattcatacggtagtacttggccctgaaggtaaaaccgttgagatccaaatacgtactcgtcagatgcatgaagatgctgaattaggtgttgcagcgcattggaaatataaagaaggtgctactggtgcaacaaccaaaggcgggacgggaagttatgaaaatcgtattgcgtggttacgtaaattaattgcatggcaagaagagatggctgattctggtgaaatgctagatgaagtacgtagccaagtatttgatgatcgcgtctatgtctttacgccaaaaggggatgtgattgatttacctgcaggctcgacaccattagattttgcttatcatattcatagtgatgttggtcatcgctgtattggtgctaaaatcggcgggcgcatcgttccatttagctatcagctacaaatgggcgatcaaattgaaattattactcaaaaacaccctaatccaagccgagattggctaaatcctaatcttggttatgtgacaaccagtcgtggtagagcaaagatccacaactggttccgtaaacaagatcgcgataaaaatattattgcaggccgccaaatcttagataatgaattagcgccgcttgatattaatatgaaagaagcagaaaaactgctgattgctcgttataacgtccatagtcttgatgaagtgctggcaggtataggcgttggtgatatccgtatcaatcaattagtcaatttcttacaaagtaagctgaataaagccacagcggaagatgaagacaaagaggcgttacgctcattagaaaataaaacggctacaccaaaaacaaccacgtcaggtggtggcagtattgtggtcgagggtgtcgggaacttaatgcatcatatcgcacgttgttgccaacctattccaggcgataatatcgttggatttattaccaaaggacgtggtatttcaattcaccgtgcagattgtgatcaattagctgagttactttctcacgcaccagagcgtattgtcgatgcggtgtggggtgagaattactcaagtggttattcattagtggtacgggttgtggctaatgatcgtagtggtttattacgcgatatcaccactattttagctaatgaaaaagtgaatgtgctgggagttagtagccgcagtgatgtgaagcaacaaatagcgaccattgatatgaatattgagatttataatctccaagtattagggcgtattttagcgaaactcaatcaattacctgatgtcatagaagccaaacgcttttctcattaagacattggtcaccttaacggataaaatgccaagcacaatgtgtcttggcatttttttacgaaattttgttaactcgacataacgatcacttttatatacaaggccagataatgtcagaaaaccgtgaaattttacgtttattagccattatggcgcaattacgtgatcctcaaacaggctgtgagtgggatagggtacaaacctttgacaccatagccccctatacattagaagaaacctatgaagtactagatgccattgcccgcaaagatttttccgcacttaaagaggagttaggggacttactctatcaagtcgttttttatgccagaatggcgcaagagcagcaattatttgattttaatgatgtctgtgaagctatcagcaataaattagaacgtcgtcatccacatatttttgctacagaaaatgaaaataatttagcgactgaaaagcatcgttgggaaaaaatcaaggctcaagagcgtgaagcgaaagcacaatattcattacttgatgatattcctgctactttaccggcactaatgaaagcagagaaaatacaaaagcgctgtgcctccgttggctttgattggcacgagctttctcctgtattagataaagtgtatgaagaaatagatgaagtgatggcagaagtgaaaaaagcccctagagatgatcaacgtattgaggatgagttgggggatttgcttttttctgtggttaatttatcgcgccatttaaaacaaaagccagagcaggcacttaatcgagcttgtcgtaaatttgagcaacggtttaggtttgttgaaaaaatgctcacagagcagggtataaacatagaaaatgcttcattagaagagatggagatcggttggcaaaaagcgaaggaaaaagaaattgagtgaagaatgactcatcattatttgtttttgtgacattaagtgcgaaaaataatagatgaaatctcattgtttttgctcactttttataaaaaattataaaaggcgaaattataaaaggtaattttgctttttttattttaggtggctttaaatatcgttgttgcatttgatttgctaaaaagtgtgattaacctcaaaaaaattaaaagcatgatcataagcaaaagatatgtcacgaaacctgctacactttatatcgtgaaaaaaataaagcatctattctctaaaagtgatatcttagctgaaaggattaagctaaaatgcttgagaaatattttcacgggtttagttgattgaatttttactgttttttcgtgtttaaacggataagtaatgtgatgaaaaagaactttatacaactaagaatgtttgtagcgaaaataaggttcgggtatactgtgttcccgtccagttatatccatcatccaaatacacctaaactttcaggttcagcatgaaaacgaattatatttttgtgaccggcggggtcgtatcctctctgggtaaaggcattgccgcagcctctttagcggctatactagaagcccgtggactcaatgtcaccatgatgaagttagatccgtatattaacgtcgatccaggtacgatgagcccaattcaacacggagaagtcttcgtcactgacgatggagctgaaactgatcttgacttaggccattacgagcgctttattcgcacgaaaatgacgcgtcgtaataactttacgaccggccgtgtatactcagaagtgctacgcaaagagcgtcgtggtgactatcttggtgctactatccaagttattcctcatatcactaatgaaatcaaagaacgcatcatccgtggcggtgaaggtcatgatgtcgtgttagttgaagttggtggtactgtcggtgatatcgaatcacttcctttcttagaagctatccgtcaaatggcggcagaagtagggcgtgagcatactttctatctgcacttaacattagtgccttatttagcggcttcgggtgaagtaaaaaccaaaccaacgcaacactctgtaaaagagttactctcgattggtattcaaccagatgcattaatttgtcgctcagatcgcgttattccagctaatgaacgcgccaaaattgcactgttttgtaatgttcccgagaaagcggttatctcattaaaagatgtcgattccatttataaaatccctgcactcttgaaatcgcaaggattagatgattatatctgtaaacgattcagcttagattgcccagtggcaaatctgtctgaatgggaacaggttatctacgaagaagccaaccctgaaggcgaagttaccattggtatggttggtaaatatgttgaattaccagatgcctataaatcagtgattgaagcattaaaacatggtggtttcaaaagccgtgttgcggtaaatatcaaattaattgattctcaagatgtggaaactcgtggtgtagaaatcctaaaagggttagacgcaatcttagttccaggtggttttggtgaacgtggtgttgagggcaaaattatggctgctcgatatgcacgtgaaaataaaatcccttatttaggcatctgtttaggtatgcaggtggctatgattgaatttgcacgcaatgttgccaatatggaagatgctaactccacagagtttgcacctgattgtaaatacccagttattgcgcttattactgaatggcgtgatgagaatggcaatcttgaagtgcgtacagaaaatagtgacttaggtggaacaatgcgccttggtgcacaaccttgtcatttaagtggcgatagtttagtgcgtactctgtatggtaaaaatactattacagagcgtcatcgtcatcgttatgaagtgaataatctactgttaaaacgtatcgaagatgcgggtttacgtattgcaggtcgttcagttgataacaagctggtggaaattattgaaaatccaaatcatccttggtttgttgcttgtcaattccaccctgagtttacctcaacgccacgtgacggccatccgttatttgctggctttgtgaaagcagcctttgactaccaaaaaggcttgctaaaataggatatgtgagaagagagcgcgtatctctcttctcggaaatttaacttgtacagaggaaaaccgtatgtccaaaatcgttaaagtacttggtcgtgaaattatcgattctcgtggcaacccaacagttgaagctgaagttcacttagaaggtggttttgttggtatggcggcggctccatcaggcgcatcaacaggttctcgtgaagctttagaattacgtgatggcgataagtcacgtttcttaggtaaaggtgttctgaaagcggttgaagctgttaatggaccaatcgctaaagctcttttgggtcaagatgctaaagaccaagctaatatcgataaaatcatgatcgatttagatggtactgaaaacaaatcaaactttggtgcaaacgcaatcctagctgtttctttagcaaacgcaaaagcagctgctgcagcgaaaggtatgcctttgtatgagcatatttctgatctgaacggtactcacggtcaatactcaatgcctttaccaatgatgaatatcatcaatggtggtgagcatgctgataacaacgttgatatccaagagtttatgatccaacctgttggcgcgcctactctgaaagaagcggttcgtatgggttctgaaatcttccatcacttagcaaaagtgctgaaagcaaaaggcatgaacaccgcggtaggtgatgaaggtggttatgcgccaaacttagaatctaatgcggctgcattagcggctatcaaagaagcagtagaagctgcgggttatgttttaggtaaagatgtaactctggctatggactgtgctgcatctgaattctataacaatgagactggtaactacgaactgaaaggcgaaggtaaaactttcacttcacaagaattcactcattacttagaagagctgactaaacagtatctaatcgtttctatcgaagatggcttaaacgaatctgactgggatggtttcgcataccaaactaaagtacttggtgacaaaatccaactggttggtgacgacctgtttgtaactaatactaagatcctaaaagaaggtatcgataaaggtattgctaactctatcctgatcaaattcaaccaaatcggttcactgacagaaacgttagctgctatcaaaatggcgaaagacgcaggttatactgctatcatctctcaccgctctggtgaaacagaagatgcaactatcgctgatttagcagtaggtacagcagcaggtcaaatcaaaacaggttctatgagccgttctgaccgtgttgctaaatataaccagctgatccgtatcgaagaagcattaggtagcaaagcacctttcaatggtctgaaagaagttaaaggccaagcataatcgtaatttcgattagaaagatttattaattttaaatgggtgaatgtattgttcacccattttttttggcgctagatagggaaagtaggatatttacactagaacaatggaataaaaagtgtgatgcgtaagagaaaatagtgttcaatttttactcttttattaataaatcggttaattctcgtggatcagatcccaattataacttttgcacattttcaatggagtgaaatgtttttatatttcacatataacctatttcgttaacaattatggcttagtgaacttaatgttcacgtcagctaatgtggagtattatcatggatgcgtccaatttagccccatcggcgaaatcaagcccgataaacaaacgagggttaattattttagcaatcgacgttgtactactgctgttattgctagaatttttaccctacgatccaaaagctaatgcaggtttagcgttaatggtgtttgtgggtgtgttatggctgacagaagctattcacgtaactattacagcgttgtttattccaatccttgcggtagtgctcgggttaatgaacaccaatgaatcgctaaaatcttttgctaatccgattattttcttattcttcggaggatttgcattagcaacagcgcttcatattcaaggattagatcgcttaatcgctaaccgcttattgatgattgctaaaggcaagctctccattgctgtcttgttactttttggggtaacggcattactctcaatgtggatcagtaacacggcaactgcggcaatgatgttaccgttagtgttaggcattttatctaacttagatattcgttcagaacgtaatactttcgtcttcgtactattaggtgttgcttatagtgccagtatcggtggtttaggtacgttggtgggtagcccgccaaatgcaattgctgctgctcaactaaatttagattttattacttggatgaagtacggtgttccaatcatgttagtgctattgcctatcatgtttattgtgatgtatctgatgctacgtcctaacctaaaacataagtttgatctgaaattagaagtgttagagtggaataacaaacgtgttattaccatgattatcttcttagtaacggtattttgctggatctttagctcctttatcagtagcgctttcggtggtgtgaaagatttagataccgtcattgcagtcagtgccgctattgttattggggtgacgggtgtcgcaagttggagccaaattcaggaaaatacagagtggggcgtattaatgctgtttggtggtggtttaacactgagcgcaattttacaatcttctggtgcaagtttggttatggctgattttatgaaagatacttttggtaacagccattggtttgtcattattcttgccgtaacaacctttattattgttttaactgaattcaccagtaataccgccagcgctgcgttacttgttcctatctttgcaacggtggcacaagctttaggtatgcctgttatggcgttaacgatgattattggtatcggtgcatcatgtgcctttatgttaccagtggcaacgccacccaatgctattgtatttggctccggatatattaaacagacagagatggtacgtgtaggtggggtacttaaccttgtgtgtatcttagttatctctctctttgcttggttcttctggttataattacaattactaattaataaataaaaggtatctataaaaataggtaccttttttattttaattaaattagtttttttattttaattattctaattttttaattttattaaattagaaaaaaaacaaattgtacctatactttaatttcattctttattctaataaaaatagtaggtacaggttatgattacagttttagattatttattagtaagattaaaagagttagaaattaaaactatttttggtgttcccggcgattataatttaccttttattggtgttgttgataatgataaagatattcaatgggtaggcgcatgtaatgaattaaatgcatcatatgcttgtgaaggatacgcacggatcaaaggtttttctgctctgtgtacaacctatggagtgggggagttaagtgcgataaatggtgttgctggcgcatttgcagagcaggttcccattattcatattgttggcgcgccttctcagtcaaagcaagagaaaggaaaaacattacatcattgtttagcgacgggtaggtttgatgcctttgaaaaaatgtatcgtcatatttcaaaaacaacggctgtattaacatatcacaatgcgacggaagaaattgatagagtattagaaacattgtggcgttatcgatatccggtttatttattaataccagaggatgtcggtgtgatgaaagttaataaaccaaagttaccattacaattaacattacctcaaagtaatcccgacgatttaaataaagttattactcttcttgaaaataaaattaagcaatcaaaatcaccatgtattattattggcgaacaagtatcacgttaccaattaagaaaacaagttgagaatttattagaaaaaactaatctgccgttttttactgtatggggaagtaaaggggttgttgatgaagggcgtcaacagtatggtggaatattatttggtgaattatctaatccacaaggtttagattatattataaattctgatttaattattagtcttggggtgagttgggatgaagttaatacagcgggatttaccttcgacgttcccacacaaaattgctatcaattttatgatacttatagcttaatagaggaagagaagatttatggcgtttctttactcgatatgcctaacgccttattagcccttgactatatttatccccacaacatagcgttactaccgcaaaaaatagtaccgcctgattggcaaggactgataaaaatagattctattcctcttctgttagataaagtccttgatgataattcggttattcttgctgaagcaggtaatgcttttttatgtgctgttaatcatatattttctggtaacagtcaattagtggtcagtaatatttgggcatccattggttatactttacccgccgcattaggtgttactcttgcattagaaaaccaaggacgtgcctttgttgttattggtgatggtgcatttcagatgactgcacaagagctttctactttattacgcttaaaactcaatcccgttatttttattgttaataatcaaggttacgcatttgaaaagatcttttacgggcctaaagatacctttaatgatatccaaaactggaattactcacagttacctgagctatttaattgtgatgcttatagcgtgaaagtggatagtctagaagcgttagaaaccgtattacctttattaaaagtgcatcaagatgaactgtgccttgttgaacttgatatggataaacatgactattcggagccaatcagtgaatttattgcgttgcttaatcagtataaatgatgggtattaaaatgttataaagtaaacagccatctaactatccgctcgatagttagatggcgttaactgtttatcaaggcgctaaaaactatttttttaagtaaagcgttaattgcgttcccggttttaacatcttgatatcagcattccagctcattaattgcttaagattaatattgtgacgacgagcaatactgtaataagagtcaccttgacgaactttatagtaacttggtgaagcgccggttggtttgcctgtcggacgattgttcacactacctgcattatgaatttttaatgtttgcccaactaatagggtactctttgcacttaatccattgagtcgttgtagctcttttacgctcatattataacgtcgagcaatggcataaaaagaatcaccggagcggactttataaataccttcttgtttaatcgactgattggctttagcgaccgctaaacggatggtctttaaaatcgcttcgtcagcaaacgcattttggaactgcgcaagtttattacgaggaagcaaaataacatgagggccatttggtgcggtgatcccgcgcttatagcctgggttatagtcttttacggttgtaataggtaattggctaagttcagcgactttgcttaatgttatctgttcgccaatatcaattgcggctaatgatttatcgcgatagttacttttcgggaaagtgatatcggcttcattgtcacggataactttacttaaggcgagaattttaggcacataattcatggtctctttgggtaatgaaagtgaccagtaatcggtaggtagatttttgctttcattagcttttatcgcttgcataacacgaccttcgcccgcattgtaagcggctaatgctaaaggccagtcgctatcaaacataatgtaaaggcgttcaagcaaatctaaggctgcattagtagaagcgacaacatcacggcgaccgtcataccattgattttgtgctagaccataataattagctgtgacagggacaaattgccataagccagccgctttagctgaagaggtgacatgaggattaaacgcactttccaccaccggaaccagtgcaagctccatcggtagatcacgtttttctatttcctcaataatccaatacatataaggctctgcacgtaatgcaacggtttgtatatgttttggattatttaaaaaataagtttcttgctgcgaaatcctttcattgtcagggatatccatttttaattcacttactacataaccccacaaattggtttttatatcatattgtggttggtaagaagttgaagtccctaaagatgtgggtgttatcgcagacaaatcgggttttatgctcttagattgctggcaacccgccaatagcaatatagagaacaaaatcacttttgtcttcatgttcgaaaattagtcctgtgtgttttttgccctaaataatactagtgttcccaaataaaacaaccgataggaactaaaagttgtcttttaattctcttaattttgtaaatgtctttattggagcataagtattagaagttatacctaaaattctttgtaaatcaatatcgtcagattttagaaaaagattaatattcttttcatttttcagtgttatcggcactgttggttgcaaatgatggcgcatttcagtaactttgtttaaataatcggtaatatcaggattttttggcataatatggtgcgcaaaggtcaagttagctaatgtatactcatgggcacaacaaattaaggtgttatcaggtaatgccattaacttttgtaatgagctaaacatttgttgtgcactaccttcaaataaacgtccgcaaccgccggaaaatagcgtgtcaccgcaaaataaataaggttcgctatagtaggcgacatgacctaatgtatggcctggtgttccgatgactaaaaaagaaaaagaatcaacgataatgtgttcttgatcatgaataattttattagcgcctttagtttgtgtttcttgtggaccaaaaacctcaatgttaggatatttactaaccaacccagcaacaccaccaacatgatcttcgtggtgatgagttaacaaaatagcgacaggtgttaatgaacgttgtgagatgatgtctataaccggtttggcttgggaaggatcgacaatcacacattcactattttcattacttaatagccaaatgtagttatcggataaagcgggaattctgataagctccataaagttaccttacttataaatataaaagggttaaacgatgaaagcagcgcgttcgggaaaaccaatttgtatgccaagctcttggcgtaatattccttggggagaatattaccgcatggcaattgaattgcgattacaaaattggtggccgaaaatatacggttttcatatgcttaaattaggtcaacttagtgctgaactcgatactaaatccagtatggtctcacatcaagttaacgtgactacaacgacgacaaacacagatgttatggcgtctctcaattatctgccatttgaaaataaatcggttgatgtctgtcttatggctcatgttttagattacagtgcagaccctcattggttattaagagaagccgatcgtgtattagtggatgacggttggatcatcctatcaagttttaatcctatcagcctattaggtataggaaaatgtacgcctattttacggcataaacagccctattattgtcggatgttttcacttcgtcgccaagttgattggctaagtgtgcttaattatgaagtgataacacaacagaacttccagattatgccattttcccgtcccgtaaaacgtgatggtaagcgctatcatgtcgggggatgtttaaatttaatattagcacgtaaaagaacgcttcctttaacacccaccgcgatgaagtttgcattaccgcgtatgagtgtaaaaggcagagttttaggcgctacacgtaatcgacctgattaatatcactatctgccgttattactctcaggttttatcttgttgactttctagatagccagtatcttcttttgtgggagattgcgcggccgctttggccagttcatcacaacgttcattttcgtcatggcctgcatgacctttaacccaatgccattcaatttcatgacgctcaatggctttatcaagacgcttccataaatcaacattcagcacagggcttttatctgctttacgccattggcgttttttccaactatgtatccacttggtaattccctgtctgacatactggctatccgtagtcagtgtaattttacaagggaattttaacgcttctaatgctacgatagcagcaaggagttccatgcggttattggtggtcataaaaaaaccttcactaagggttttttcatgctgttggtagcgtaaaattgcaccataaccaccaggacctgggttgcctaaacatgaaccatcggtgaatatttctacctgcttgtgcataaaggcgacttatcctttttaagtaatacgaaaaattaaccctaagtctgacataaaaacggattatgagcactccaatcacacgacaaattgtactagataccgaaacaaccggtatgaacaaactgggcgttcactatgaaggccataatatcattgaaattggtgccgttgaggttatcaatcgtcgcttaactgggcgaaatttccatgtttatataaaaccagaaagattggttgatcctgaagcttttgaagttcacgggatcagtgacgaatttttagaagattgtccttcatttgcagaaatagcggatgagtttttagcgtatattcgtggtgcagaattaattatccataacgcctcgtttgatatcggctttatggattatgagtttcagaagcttaaccgtgatattcctctcacagaaactttttgccaaataaccgatagccttgctatggcaagggagttatttcctggcaaacgcaataatctagatgcgttatgtgacagatatttaattgataactccaaacgaacactgcacggcgcattattagatgccgagatcctcgctgatgtttacttagctatgaccggtgggcaaaccgcattagctttttcaatggaaggtgaatcgaacgaagagcaaaaaggggatgatatacaacgtattgtacgaccagtgcgtggattaagagtaataaaagcctctgcagaagagttagttgcgcacgaagctcggttagatttagtggtgaaaaaaggaggccactgtttatggcgtccagctcctgcttcgaatgatgaaactgcataaaggtaaagtgatataaatagagtgttgagattaaaaactatccaaacgcatctttttgttagaaaaatagttgacgacaaggtaagagattcgtaatattcatctcgtccgaaaggatacgcggagcggtagttcagttggttagaatacctgcctgtcacgcagggggtcgcgggttcgagtcccgtccgttccgccagaatttatcgttttgatgtattaactgacatcaaaataattagaaaccgtatcgctttatgctgatgcggttttttttgcctaaaataaaaatagtatcattaactcattaactcattaactcatttagtcagtattctgtcgacactcacgtcttctattacagatatctaagtttattacttttgtctctgttttctacctccatttataacgccactattatttgctattaaataagagcaattcatattaattggtagctttattttacctattatattttgttatcgataatggtaactattatcgttatagttttaattcgcattatcttgctataatctctcttatacctagcgtggggtaactaacaggctaacattcaatgagcgaaaatagagcgtctaaacaacactcaagtaaaacaacaaaagcaagggtagtgaaggaatatcagcgacagatacttcgtcgtttcttttacttaatgatattagggggcgtgttatgtagcgttttgatccttgattttactttagggccttcaggattatcgctgactgaactgtggaatacactaatatcgccagaaactgccgatgctggcactcgggttattgtgtgggatatcaggctaccttactcccttatggcggttgtcgttggaatgtcactcgggttagcgggtgctgaaatgcaaactatactcaataacccgctggcaagtccctttacgcttggcgtctcttctgccgctgcttttggtgctgctttagcgattgttttagggattggtattccgggggttcctgctcagtggtttatttcagttaatgcgtttattttcgcattactggcaacgttgttactggactttatctcacgttggatgcgagtttctacctctggaattattctctttggcatagcgttagtgtttacttttaatgctgctgtttccattatgcaatttatcgctaacgaagatacgcttcagggattagtgttctggacaatgggtagccttaatcgggcatcgtgggataagttatacattttattggttgtattagtgattatcttccccttgtcattgatgaatgcttggaaactgacggcacttcgtctaggggaagatcgtgcgatgagctttgggatcaacgtcagacgcttacgcctaacaacattacttcgtattagcatcatttctgccttggcggtagcatttgttggcccaataggttttattggattagtcgctcctcatattgctcggatgacttttggcgaagatcatcgtttttatttgcccgcaagtgcccttattggtgcattggtattatcgatagcttctttagtctccaaaaaccttttatctggtgtgattattccggtgggaattgtgacttctcttgtgggtatccctttctttgttagtatcattttgcgtcatcgcgggagaatataatgaacacgggattgaatgctgggttgcgtattgaaaagttttctacgggatatgcgaagcgagaaatcattaaagaattaacggtctcactgcttccacgagggaaaattactgttcttttggggcctaatggcagtggtaaatcgacgttgttaagggcgcttgctgggcttaatagcgcacaaggaaagctttttcttggtgatgatgagttactctccctctctttttctaaacgagcagagcaggtggtttatttgccacaaactttacctgcgggtgttcatttgagtgtcttggagtcaattctggttgcaagacgagctttaggtgaacatcgttctcattcagcgaatgatgaagttatagatctattagaacaactgggaatttcacatttagctatgcgatatcttgatgagttatccggtggacagaaacaattggtggggcttgctcaatcactaattcgacgaccaagtttattattgctagatgaaccacttagcgcactcgatcttaattatcagtttcatgtgatggaattaatcgcgagagaaaccaagaaacgtaatatgattactgtggttgttgttcacgatattaatattgcattacgccatggagagtatgtattaatgcttaaaaatggggagttagttgccaatggtttaccaactgaggtgatcacaccagaaatactcgccgatgtttatcgcgttagcgcccgtattgaacgatgctctagaggccatccacaggtattaattgatgggaggataaatgatatatagcatttttaaaccactcaaataattgtatttgatatgatgactatacttatttgggtggtctttgatagattcaatttggtttatatttaccattgataatacgcgtggcttgttttattaaaggtaaatcaatcatctccccattaatctgaaaagcataactggctgttgattgcttaaccacttcttgcgcccatttaattttttcctcagtaggtttaaatgccttattaacagtatctatttgatccggatgaatacagagtttagcgccaaatccaagagcgctagcatggttggcgtccattaataatgtattaggtgtgcaaaattcaggggtgacacagtcaataggggagataaggttggcaatgcgtgaagcgataacgattcggcttcttgcgtatagcaacgcttctgctgtttgttggcaatcaatatctagtgagtaatctaatgagccgaatgctaatctcgttacaccactattggcaatctcttcacaatggtgcactccacgcgctgtttctataatgcctataaatggtcgctttgatatagccagatgaagttttgattttatataggaaagtatttccgcatcttccagttttgggatcattactcctgtcattagcgtttcatttaatgaatttaatagatcaacatcgtttttaaattctttctctttaggatgatttattctgatatatatactggtgttaatgatggtgttatttattgtcgttagccaattttgaatgttgtcacgtccgagcggtttttcatcaggatgaaccgcatcttcaagatcaagaatgatcgcatttgcaccataagttaacgctttggaaatcataacttttttattagcagggacaaacagatagctaatctcttcgttcatatttacctaccttagtaataaatataatgtatcttccataaaaacgaataattatgagaatgagattgattattatttacatcatcattttctgatggtagcttactcatcaacctttttcaagacgctcgaaaaagtaaaaaaaggttaagtaaccccccaagatagataaatttaaattaattgtttaagccttatttctttgggagaaaaatgatggagacggtagagaaaaagagtattgcagggcaacaaactgctatacaaacagatttttcaacacgtaatgcccttgctcgtatcattcgctgtctttttgcagaaaaattattggatgataataaactgcaagttttcaatgatgaaaataacgttaagtacccgctttctgatgggatacatatccttcaatttaatcaaacgaccgtttttcctgcaaataccgttattaatcgcggtgatattatccttaaatcaatggatggccgccaccgaatggtgcaatcccatgaagaacttatggggatactgaaaaatgaacttagtttcacccctacaacggagggaatgacaaaattcaataaagatgtagcaaacagtatccataatgatcgattagctagagcacatcggtcaaagtggcgggatacgatttctaatgagatggcacaagagggaacatcttgttttattgaatggataactcgtcattacagtcggcgtgatggtgcaacttttctcgatcagtggggtgcgcttgaaggtcattcttattacccaacttggaagtctagacccggtttaagcgatgatgatattgtcgcactatcagctgaatttggtgcacgagttaatctgcgtatcgcagccatacaaagcgatatggtttattgtgagaagatgccccatattcaggatatccatcaatggttttcatcggcttttccaaccgtttggaataaatggtgtgagtggcttacaagtcaatatcaaaacccacaaaaatggttacctattcctctgcatccttggcatcttgaacactggatcattgcgcatttctcaaaagaaatagatgaaggcattcttctaccattaggccctcaacttgagaccgcggcatccatgtcgtttagaaccatgcttcctaccgcatctagatcaccctttatcaaattacctgttgctatctggatgactagcgaaatgcgcagccttcaagccaaatctattcatatggggccacgtattagtacgattattgaggatattttgcgggtggataaggattttgatggcaagctggactttttccgagaagaagtggcgtggcattttcgtcataacgtacgtatggatgacgctgaaggtaagtttctctcggttgtatttcgtgatacgcaagcatgggaaagaaacgataatttaatcgctatcacagttgcatcattatttactgagctcccacataaaccccaaccccttattagcgagctgatcgcattatcaggcgacttacctgaaacatggtttcgtaattataccaaagtcatactgaaacccgttttagcgatgtatttaatttatggcattgcccttgaggcacaccaacaaaatacgcaagttttatttgatgattccggtcgtgcggtcaccatgcttattcgtgattttggtgatggacgcagttgggctccagcactgcgtcagcaaggatatgagcttcaaccttatatctggcccggcattttacccacggtgtttgaagatgatattgaacctgtcagaaccttcgttgtagatgcttgtcttgtcagccatttacatgaaattgcgctttgtttaactcaactttatgacatccctgatacccgcatatggactgtgatcggcgaagagcttgaacttgtgtttaaagcacttcaacccagagtagaggcggatttttggcacaaagagcgtgaacattttctccaccacccttggtatacccgctcattaatgagcatgcatttacagcaatatactgattaccgtcttcagcatggacttaacaatccgttagctggtgaacaagtagataactctaagatctgagagaataataatgatcacaaacaaacattttttagcattgactattgcagcaagtttaattcctgatttcgtcagcgcggaagagagaattattgttaacgcagagcgcgttaacccccaaactaaaggtaggttatcacaacaagccaacataggtttattgggaaataaagatatccaagatattccatttagtattaagggatatacctcgaaatatattgagcaacgacaggctaaaacacttggcgatgtaataaaagatgatccatccgttcaagtgacatctccgtcaggtggtattcttgattcctttatgatccgaggattccctatcggggaaggcaatattggtgaagttgccctcaatggtgtttatggtgtagcgccaaattatcagttattacctcaatatttagagcgaatagaattactaaaagggcctggggcggggctttatggtatctcccccaatggcggggttggcggtgttgttaacgcggtgacgaaaagacctactcgtcagggaactaaacagattactaccacttggggatctgataatcaacttggtgcctatatagatgtaggtaaattgtgggtaaccccagacggtgaaatgtggggcgtccgatttaatggtggtggtagtggtggagatctggcgcttgataatactcataaaaaaacggcattaggtgcactcgctcttgactatggaaaagatggattcaccgtttcagttgatttattcgatcaatatcaatatgtcaaatcacctaatcgtccttttattgtcttagcgggtatcgatgttcctaaggcccctaatggtcgacgcaatattgcccaaaaagggatgtggtggaacacccgcgatcagggcgtattactgcacagttcatacgagcttaacgataatctaacactcttcatgaatgccggtggtggtcgttcaatcgtttcacgtatctctgagcaaaccccaaagattattaacgacaatggagatgttgaatcggcaatcactaattatcgctttaatgtacatcgttatatttttgaaaccggtgtcagaagttatttttcaacgggcgctattgatcatcagatgacattacaggccagctattatcatgaccgtcttgctgttgcgggtaatgtaggaaaacaaaaggtgatttctaatatttattcaccatcagaagtcgatgttaccctaccatcgtctccagcaagcgttcccaaagtatcttctagtcaattaactagctttgccgtttcggacatcatgaccatattgaatggcagtgtggatattatccccgggatacgtttgcaaagagtgcaagccgataactttatggctaatggacagcgttcggccagttatgatgaatcagcggtgacgccaatgttggggctggtttaccatcctttagagtctgtttcgctctatgccaactatattgaagggttaagcaaaggcgatatagccccgagttttgcaaaaaatgccggccaagtgatgcgtccttatcgctcgcgacagtacgaagttggggttaagtatgataatgcgggaatacaaagcagtttggctcttttccagataaccaagcctagtggtgctatcgacagcactgataatatatttaatgctaatagtgagcagcgaaatcgtggcgttgaagttaatctttcagcgcaggtgctggataatttacaaatctcaggcaatctttctcttattgatgccgaacttatcaaatcgcctaaatctgatatccgtggtaacaaacccgttggcgtttctcctctacaagcaaatgtgggagtggaatatgaccttcctattttgcatggattgtcattaaacagttatgtcaattatagcgcaaagcaatatgtcaatcaggcaaatacacagtctatcaattcttggacaacggtagatatgggagcctcctataaaacacgtgtgtatggtgcgcctaccactttccgttttgatgtacagaatctatttaatcaccattactggtctggtgtcgcgtcatataccactattgcacagggagcaccacgtactttccttgcctcggtaagtgttgacttctaagagggttccatatgtcttcgttgttaaatacttattaccgagcaaatgaatcttggcagatcgctataacccaagcattacccccttatatcgatccggttattatccgttggttggagacatcccctgatacccttgttcatttaacacagatatatggttcaccccttaatattgtctggcctcatactgtggagcagaacgttaatgccatggtcgaagtcgccaaaacatttggtatacaaaccaatttgtattatggggttaaagtcaataaatcacagtcattattacaagccgctgttgctgcgggaactggggcggatgtatctagcctatatgaactcaacgatgctattcgtgcgggatgtaaaggtacagagttgtgtgctacaggccctgccaaaacaacggcatttttacaggcgttaatagtgcaaggggcacggattgttattgattctattgaggaaatggacgagcttattcaccttgctacaaggtggataagtccatcaggacgtataagtatactgctgcgttttcgtcctgagtctaatcatatcagtcgttttggtatgttatccgctgagatcatgacagcgcttgagaaacttaattatagtgaccaagtaaaggttgatggattccatttccatcttagtggttactcttcggtatctaggatcaaagctttttttgataccttacccttgattagctacgcacgtgctttgggttactccccttatattatcgatattgggggagggttacctgttcagtatgtagacagtcattgttataagaaatggctctctacgcaaacacataaagactatcgtactcgacgaattcctgattctttctatccatatggtggagagataaatgcccaaggctggctcactgagtttctaaccggagtcgatcccacaggtaaaagagtttgtgatgcattaattgaggaaggattaacactttgccttgaacccggaaggagcttggttaatcaaagtgcgatcagtgtatttcgtgtctgtcgagttcgtccatatgatcatgtcggacatgttatttttgtcgaaggaactagttttagcgcatgtgaaacgtggtttaattctgaattcttaagtgatcctctccatatttatcgaaataaccatcagccactttcttctgctggaaatgcttggattgcaggccatagctgtttggacgacgatgttatcaccaatcgtttgatcgcttttgcacacctaccaaagccaggtgatttactgatatttgctaataccgcaggttaccaaatggatttactggaaaatcaatttcatcggcatccgttgcccacaagattaactgcggtcataaactcacatcaaaaacctatatttaccattgataattaaggacttttaatatggtttttagcaaagtaactgatttaattggtaatactcctatcattcaattaccgctgctgcaatcggatacgcgtctttatatcaaagtggagaaaaataatcccggaggcagtatgaaagatcgcatggcgagaaatatggttgttgcggcactgaaatctggaaagatcaagcctggtagtacaattgtggagtcgtcatcaggaaatactggcattgggttggcaatcgctgctatcgaatttgggcttcgatttatcgcggtggtcgatcaccatgctgcccaagataaaattgctatcatgcgcgctttgggtgctgagatccgctacgttaaaggcgactatggtgaaaatgaagttgctgttgtggaacgccaacgtatggcggctgaaatcgccaatgaaattcccggcgctatctttatgaatcaatcagataatgcagccaatgcgggaggatatgcagatctggtacgtgaacttattagtcagataggcaaaattgatgcgtgggttggatgtgtaggtacgggtggctctatgacagggatagcccatggattaagagttcataatccagaacttgtaaccattgccgtagagccggaaggctccatcatattcggaaaacccggtaaaccatactatcaatcaggtacaggcaccccacaaggcgatacagtggggttagtgttggattacagttgtattgattatggcgaacaagtctctgatgtatgtgcttttgaaacggctcgttaccttgctcgtcgttttggtttactggttggtggctctacagggggagtggtatataaagcgctggagttgattaacaatagtacaatttgcggaaatgttgcacttgctatggctgatggtggtgaaaaatatctgcagacgatttttaatgacacatggcttaaagagcgaaatttaatatcggagtcagtctgggaacaacttgataattggttttctttgccaacttgtttgggggatagcagatgatcccaaatgagaaattgagagtaacactatgtggagccggtcgtacagggcatcttgcggcaattttatttagcttaaatcctgcgattgacgtcactctttacagcagtcgctcagaagctgtgacagcatataaagaaaatgatcatcaacttcaggcggtgatgcctgatggtcaagttattaaaacccgctcggttaggatgacagaagccattgatgaggcgtgctctgaggcagatatcatcattattacgacaccaagtcatgtacgtgaaagtttacttcaacgtatggcgccaatactgccgaaacataaaaacatctttgtgggcgccattcccggttttgctggctttgactggctggctgaaaaaacgttaggtgatgcatccaatattgttatatggggaatgaaagatgttccccatattgcatttgatctgcaaccgggaaaaagtgtcagaatggggggcggaaaatcacaactctatgtagctgtgcatagaagagaaaaaccgcaatatgccaatcttcttctcaattacctcaaacaactttatgactcacctattacgctactgaccgattatctagaaattaccctaacgccaggaaatcctattatgcacagctctgttatctatggccttatcggtccatggggacagtggcacaataggccttttgagagcattccatgttggtggaacgattgccctgagttgggtgcctattttcttgcccgctgtgatagggagaatcaagcgttatgtaataaagcagaagttgtattggggattaatctcagttccgtgcaaccattacagcaggaaatagtagccgcatatgcggactcaattgctgatccgcgaacattactcagtgtgttacgaacgaataaggcctatcagggtattcctttacctcttatttctacagcacaatcccatggttatatttttgacaaacaacatcgagtttttcaggaagacattgcctatggactagcgcttcttgttgctcttggggaacgtcttcgagtaccaacaccctatataagagaaatatatgattggtgttgtggttatatgggaggaaatctgcctcaccctcagatcccaatggattggccaataataagggtgaaatagtatgcgtgttaccggcagtgtcatttttattgtccagtttttatttatcgtacagttactctcaatgggagccatggaaatgagtggccctttttggccgcttcatctcgaaagtatggcgtcgacagagctactgagtatcgtgggaaccggcgtgtatatcgcacctatgttgggcgttatgctaaccagtaccttttggggacgaataggcgataaaactggcaataaagtgatgatgatccgtgcactgatggggcttgcattaacgcaattggggctcgcttttgccaatgatgtctgggtaatactgctactacgctttttacagggaacttgtgcggggtatattgcacctgctcaagcttatggtattgccatgatccccatagcacaacgtactcggcttttggcatggttacaagtatctaccaatgcaggatcgttagctggagccattgctggtggggccatcctcgatttactgagtttcttttggataaacttcggggcatttatcatttgtacgttatgtgcactactggtttttttcatattaccgaatgatttaccgcgccacgcttcatccaattgcgtcacttcctcaacaaataaagcaaaagcgatatcatcaattaaccacagcgtcattgttggcttacttaccgtactgggtttgttattaatgagccgcatgatcacacaaacccctttttctctttatgtcagtagcgtatttaatgcctctaactggttaacaggggtcgcttacggattgcaggctacaggtgtgattgtctcagcctccctctgggcaagatggtttgaagcacacaacatatctcacgcactctatcgaatggtggggatcattgcgggatgttttattgtgaccttactgctagcagcagtaagagaaataagctggtttatcggactttattttttgtggggcattcttcttggggcaacaacgccagtattaaccgcattaatatctcgctcaaccgctgaaagtaaacagggttatattttgggactggtgcaaagtattagccagtttgcctctatggttggcattgcactgggggggggaatacttgtttggcctgggttgaccacgttgtttttgtgtgtggcggtgatgtattgcattactttaattattacgctgaaaatgagttactcttcaaaaaacactaaccaaaaataggttattaatcatgatattacgatttatattttctattgtattgttgtattcatcaatggcttactcacagcaagttgtaacacctgttactgacctacttggcagaactgtgaatgtcaaattaccggtacagcgcgtcattttgggggaaggacgacagctttatttagtggctatgtttgataaagaaaatccagcacaaaggatagtcgcttggcgaaaagatttaatacagtccgatccggccacatggcaacagtaccgacaacaatttccacagttggcaaaaatccctacctttggtggcagcgaacaaggaacgtttgatatagagcaggcgattaatctgcaacctgatgtcatcatcatgaatatggacgcacgcaatactattgttgatgctggacacgaagctgcactagcccgtgcgggtattcccattgtttatgtcgactttcgctatgatcctattgcacacattcctccaacagtgacgttatttggtaaattatttggccaaccagatcgcgcagaagcttatttaacattccgtgataaagagttacaacgagtgacatctcgagttgaacaattacagggggcattgccaaaagtatttttagagcgtcttgggggttattcagaagagtgctgtatgacctttggtaaagggagttttggccgttttgttaaaatagcggggggggataatattgccgacaatcttgctccgggaaccttttttacgctaaatccagaaaaagtggttgttgcaaatcccgatattgtgattattaccagcggcaattttcaggcatttgtgccgggtggaaagtggatcccacttgggccggggattaatattcaacaatctaaacatcgactcgcatggtttacgactcgccctgcttatgttgatagtaacgctcgccgtcgtggcgcattttttgctatttggcatcagttttataatagtccctatgatgttattgctatccagcagctagctaagtggatacatccccaattatttgctgatcttgatcctgatgacacattccgtcgtttacatcaagaatttctacccatctcatatcagccgggatatatgattgatttggaaaaagaggggaggtaaatatggagtatgatgtcgtgttatatcccattgccttgctccgtccttcagaagaagtcaacatggctcatgttgaagctttaactaaggaaatagtccgttgccaaagatggacaacacctatacccattgaaaaagagaccggaattattatggacggtaatcataggtatcaagtcgctcatcatcttgctctcacttatattccttgtgtgttgcttgattacactgatacacgcataactgtgtatgattggcagaatggacgagcgtttagcccattaagaataagggagcagatattaaagcaaggtaatattttcccttataaaactactcgacatctattttctccaagccttccggccgttaattttccgcttgaacaattagttgaaaaaatagccagtaatcatctgaatgttttcaagttaggtgttggtaggtgaccattaacagcgggaaaattaaatagcttagtatttatttgatttgatagataaaacagcaacgtaattttagcttgattagtcgtatcaagctaaggtttaataagatacttcttaattgcgcaaataaaagtcatttttcatttttgttgcgcaacaatgtggtggtgtaatgttatttcccgcgtttatcgtaataaatgctgtttaaatcaaagaattattgattttcactgattacgatagccacctttgtggattttttatattgcggttttttgcccgcattgagagaatcagctatctagatgctttttatccgacttggagtagaaaatgaccactcgtaaaacccttgcaaatgcgatccgttttttaagcatggatgcagtgcaaaaagccaaatcagggcaccctggtgcacctatgggcatggctgatattgcagaagtattatggcgtgattttttaaatcataatccaactaatcctcactgggcagatcgtgaccgttttgttttatctaacggccatgcttcaatgctgatttatagcttattacatctgtctggttatcaagtttctttagatgatctaaaaaatttccgtcagctgcattctaaaacaccgggtcacccagaatatggttataccccaggtgttgaaactaccacgggtcctttaggtcaagggattgctaacgcagtaggttttgcgatcgcagaacgcacattagcggctcaatttaaccgtcctggtcacgatatcgtagatcactacacctacgcctttatgggggatggttgtatgatggaaggtatctctcacgaagtatgctctttagcaggtactttacagttaggtaaactgattgcattttacgatgacaatggcatttctattgatggtaaagtacatggttggtttactgataatactgctgaacgtttcgaagcgtatggctggcatgttattagtggtattgatggtcatgatgcagcgagtattaaagctgcgattgaaaccgcacaacaaattactgataagccttcactgttaatttgcaaaaccactattggttttggttctcctcataaagcaggtactgccgattctcacggttcaccattaggtgatgcagaaattgcagaaactcgtaaagctctgggctgggagtatggtccttttgaaattccacaagagatctacaaagagtgggatgctaaagaagctggtaaagcaaaagaagctgcgtgggacgctaaatttgctgagtatgcagcacaattccctgaattagcagctgaatttaaacgtcgtatgtctggcgaattacctgcaaattgggaaaaagagtcaacagcctttattgaacagttgcaacataacccagcgagtattgctagccgtaaagcatcacaaaatacattagaagcgtttggtaaagttttacctgagtttatgggtggctctgctgaccttgcaccaagtaacttaactatgtggtctggctctaaagcattaaatgaagataaagccggtaactacatccattatggtgttcgcgaattcggtatgtctgccattatgaatggtattgcattacacggtggttttgttccttacggcgctaccttcctgatgtttatggaatatgcacgtaatgcggtacgtatggctgcactgatgaaaatccgcagtatctttgtttatacccatgactctatcggtttaggtgaagatggtcctactcaccaacctgttgagcaaatggcaagtctgcgtgtaacaccaaatatgagtacatggcgcccatgtgaccaagttgagtcagcagtagcatggaaatacgctgttgagcgtaaagatggtccaactgcgctcatcttctctcgtcaaaaccttgctcaacagccacgtactccagagcaactggctaatatcgagaagggtggttatatcctgaaagattgtgacggtacacctgaacttatctttattgctacgggttctgaagttgaattagctgttaatgcttacgatcaattaacagcagaaggccgtaaagtccgtgtggtttcaatgccagcaacagatgcatttgataaacaagatgctgattatcgtgaagcagtattacctgcagcggttaaagctcgtgttgctattgaagcgggtatcgcggattactggtttaaatatgttggtcttgatggtgtgattgtcggtatgcatagcttcggtgaatctgctcctgcaaacgaactgtttgctgagtttggttttactgttgaaaatgtggttacacaggcaaaaactctacttaaataatcaataaatgttaacaagagcacatttttgggaataatttctcagatgtgctctttttttatgcttccccctttttttgctattgcgattttctctcatttctcgtaatctgaataccaataagctgaaccgtttcagttatgctaaaaatgtcggtgaccgcacattttttagttttacttgatttatcgttgttgattagtcaattgctcgattattctaggcggttgcataattacgagttatcaaggaagttacatgacaattagagttgctattaacggttttggtcgaatagggcgtaatgtgttaagagcgctttatgaatctggaaagcgggctgaaataagcgttgttgcaataaatgaattggctgatgcgacaggtattgctcatttgcttaaatatgactcaagccatggtcgttttgcttgggatattcgtgttaataatgacttattgcaagtaggtgatgatgcaatccgtcttttccatcatgccgatattgcagacttaccttggggtgagttaggtattgatgtggtacttgattgtagtggcgtttatggatctcgtgccgatggtgaggcgcatattgctcaaggggcaaagaaagtgctcttttctcatccgggaacgatagatcttgatgctacggtggtattcggtgttaatcaacatgaactgaaaaaacagcaccgcatcgtctctaatgcctcttgtaccacaaattgtattatcccgattattaaaatgatggatgatgcttttggtatagagtcaggtacagtgacgacaatccatgctgcgatgaatgatcaacctgttattgatgcatatcataaagatttacgtcgtacacgagccgcaggacaatcgattattccggttgataccaaattagctgccggtattacacggattttcccgaaatttaaagatcatttcgaggcaatttctgtacgagttcctacaattaatgtgacagcaattgatttaagtgtcacggtaaaaaatgctgtaaatgtgttagatgtcaataagttaattcaaaaatcagcaactggcgcatttcgtggtatagtggattacacagaattgccattagtctcaacagattttaaccacgaccctcatagtgccattgttgatggtacacaaactagagtcagtgggcagcatctgattaaaacgttagtctggtgtgataatgaatggggctttgctaaccgaatgcttgatacgacgttagctatggctgcaactggttttaaataatcatgtattaatgacggtactcagcaatagcacattatgtgataatgcgcggtactgaacagaagattactaaattttagagaatcaatgagaggattcatcatgtctgtaattaagatgaccgatttagacctggccggtaaacgagtactaattcgtgctgacctgaacgttccagtgaaagatggaaaagtaacttcagatgcacgtattcgtgcttcattaccgactattgaagcggctttaaaacaaggcgctaaagttatggtaacttcacacttaggccgtcctactgaaggtgagtacaacgaagagttctctttaaaaccagttgttgactatctgaaagagaaattatctgcacccgttagcctagcaaaagactatttaaacggtgttgatgttaatgcaggtgaattagttgtacttgaaaacgtccgttttaataaaggcgaaaagaaagacgacgaaacgctgtctaaacaatatgctgcattatgtgatgtctttgtcatggatgcattcggtacggctcaccgtgctcaagcgtcaacacacggtgttgctaagtttgcggatatcgcttgcgcgggtcctctgttatcagcagagcttgaagcattaggcaaagcattagataaaccagagcgtccaatggtggctatcgttggtggctctaaagtatctactaaattaacagttttagattcattatcaaaaattgctgaccaattaatcgttggtggtggtattgctaacacctttatcgcagcagaaggtcattctgtaggtcgttcattatatgaagcagaccttgttgacgatgcgaaaaaattaatggaaaaatgcgatattccagtaccaacagatgtccgtgtcgcgacagaattctcagaaacagcgccagctgtactgaaatcagcaaatgacatcaaagatgatgaacaagtattagatatcggtgatgtgacggctgaacgtttagctgaaatcctgaaaaacgccaaaaccattctgtggaatggccctgtgggtgtctttgaattccctaacttccgtaaaggtactgaagtgattgctaaagcgattgctgatagtgatgctttctctatcgctggcggtggtgatacattagcggctatcgatttatttgatatcgcagataaaatctcttacatttcaaccggtggtggtgctttcttagaattcgtagaaggtaaaaaacttcctgcggttgctatgctggaagaacgcgctaaacagtaattaagtcacgctcatacaggtagagtgtaaaactctgcctgttccaaatataggatcttattacatgtctaaagtttttgatttcgtaaaaccgggtgtcatcactggtgatgatgtacaaaaagtatttgcagtagcaaaagaaaataattttgctctgcctgcagttaactgcgtaggtacagactcaattaatgctgtattagaagcagctgcgaaagtgcgttctcctgttattgttcaattctctaatggtggtgctgcatttatcgcaggtaaaggtcttaaagctgaagcgccacaacaagcggctatcctaggggctatttctggtgctcaccatgtacaccaaatggcagaatactatggtgttcctgttattttacacactgaccactgtgcgaaaaaactgttaccttggattgatggtctgttagatgcaggtgaaaaacactatgcgaaaacaggtaaaccactattctcttctcatatgattgacttatcagaagagtcattagaagaaaatattgaaatctgttctaaatatttagcgcgtatggctaaaatcgatatgactttagaaatcgaattaggctgtactggtggtgaagaagatggcgttgataacacaggtatggatagctctgcgctatatacccaacctgaagacgttgcttacgcttatgaaaaactaaatgctatcagcccacgtttcactatcgctgcatcatttggtaatgttcacggcgtttataaaccaggtaacgttcaattaacaccaaaaattcttcgtaactcacaagactatgtgtcagagaaatacaatctgccacacaatagcttaaactttgttttccacggtggttctggttcatctgcagaagaaatcaaagaagctgtaagctacggtgttgtgaaaatgaatatcgatactgatactcaatgggcaacttgggacggtatcttacagttctacaaaaagaacgaaggctatttacaaagccaattaggtaatccagaaggcgctgataaacctaacaagaaatactatgatccacgtaactggttacgtcatggtcaaacatcaatggttgttcgtttagagcaagcatttaaagagctaaatgcgattgatgttctgtaatacaattttattgtaatacacctaaaaaacccgcttagtatgcgggtttttttgttggttgttagcactagatacgatggtattgggctatttagtttcggttatatttgtcattaaaggtttggtctgaaatacacagataataaattccttcaataaaaccgataatagcgggtatccccgtccagcaaaaaatgagatataaaatccccattcctactttacgaagatagaatttatgtattcctagcccaccaagaaaaatagctaataatgcggctgctagcttatttttatcattcattaatatctgctcctattaccaatcattggtttttaatcatgaatattgattattagacaatgctaaatattgtcagtttcaattaaaggtactatttataagatagattaaaaccagaaaaaagaaaaaaagagaagatcactaatcataaataataaaagattaaggttgtagaagatttaatcgctaagcatttttataagagataaaaaagcgcctttctaggcgctttgtctgtgataagcgaaggtgtttgcttatttacttaatcattttactctcttctttcatcatgcggtttagtaaaggtactgttgcccacataatcaaaccaaccactaaggtaacgataccgattttgccaaacacatcagtataaataggcagtgtttgtagtggatcggtaataccttcaggtggcgcggtaaaggttgctacatggcctcctaacaggtaagccgtcgcttgtgttaagaaccacatacctaaaataaagcccatcatatattgcggtacgaaagcggcaatcatcgctaagcctaatgcactgatcatcaattcccctagactttggaagagataaatcagtacaacaaaccaaggtgatgttaagccttgagcatcagcaaaccacatacctgaagcggcagcggttaggaagcctaatgagcataaaagcatacctgtggtaaattttgccggcatggataaatctttgcctttcgcgccaaaatggctataagccattgctaagatagggctggcaataatgatccaaaatggatttaatgcttggaaactcaccgggttaatatcaaagcctaacagggtatggtgaacattatggatagcaaaaaagttaagtgaggttggcatctgagcgtagagaatatagaaaataacagcttctaacatcagaacaaatgcaacatacattttattacgtgccactctgtctttttgtttaaaggcttcacgaaaataaatgataaccacaacaatagacaagctgattaaaacgatgttagcaatcatcacattgtgcaacaaccatgcacaaataaagaccatagcgacagagcctgcaataactaatagcagtttgttgaaattcattggcaggtgatctggttcagaaccaatattcacgaccattttacggcagaaaaaatagaccaatatggccattattaagccgataccacaaatattataagtcagcgcatagccatagcgatcggcaagaacgggggcaatagataaggagattaatgaaccaacattaatcgacatataaaatagtgtaaatgcaccatcaagacggggatctttaggtttatagcatttagctaataggcttgctgggtttgctttaaataaaccgttacctactgcgatagtggctaaagcataaaagattaaattaggatacataattgacatgccggtcataaaataaccgatagccaatacgatagcccctaaaacaatggttcgtttggtgcctaatagatggtcaccaacataaccaccaatagaaataagcccataaactaatgcggagaatgcaccaaaagtaataaaagcttgttcttgagagaatccgagtttactaacaaaataaacggcaagaataccttgtacgccgtagtaaccaaaacgttcccataattccacaaagaaaatcataaagaatggtttaggctgttgtaataaaccgactttagcgggtttatccatatctttaatgcccctaattattatttattttcaacaacgatgctatttactcaaattcacgatgaatgttacaccctgataacattatctgttgtatttagagtgatgtttgcaaatttaagatggtgatcggtaagtccggtagactaatatattgatagaatgacttctcaaaggttgatcacactgttagtaagattaataccagattgaaaaaaatagtcattaatttattttcaattaaagcgatttaattgatctttggtataaataatcaccaaaaagagcctattttgtttatattttaagcttaataaagctgataaaatataagcataaaaatagagtggaagggatatttatatcgtgactaattgattttctaaagaaaaagttttcttataattttaataatttcttttataacaaacagatgttaaaaatagtttaataaaacgctgatagctctattttaggataaagtgaaataaatatgcatgaagtgcgggtaattatttaaaatttaacaaaggtaataaaaacgcctttattaataatgaaggatttaaattgataccctcttcaaaataataaagtgcgtttttgtttttaatattagctaattaagcggtggttgggactaatttatgtttaacaggatggaagcgacgcttaaaataaattaagccatcgccatcttctcgaaccgcaatattttttatctctgccatataaacaaagtgagtacctacttggcgtacatcgtaaatatcaccttctaggctagcgagtgcattggttaatatcggttgctgtaatgcgccatattgccatcctggttgggtaaagcgatcagccattgccagacctgtcataccggcaaaatggcaagccatctcttcttgttcatgatttaaaatattgatacttaatttgccattttcttgaaacgtactattcatttggcttttactattgatgcaaatcatcactgtcggtggagtatcggtaactgaacatacagctgttgctgttaaaccacagcatcctgcatcaccattagttgcgacaatattaacggcagcacctaagcttgccattgcatcccgaaaaagtgggttagcctgtttttcatcagacattttttactcctactgccagacttctcatctgtgggcgtcttcacttaaaataaccattagttagaaaatcagaatttatctaactagtgccgcttcacaaagttgtaatgatcttgctgatttctttgctgtgtgaatttaaagccgtaacgctacctcgcattagccaagagatcaatctttctttgttacaacctgttaactttatctcaaaaagtcgtgagacaaccttatcgctggttgttattattcctaataagtcaagaaaagcgataggtaaatcaagtgatttagcctagtttgctgataaataacacgaaatgacacatattatcctgttattttttggggatattacgcggttttgtctgagaaaagtactaaggtcatcaattgctaaaatagcctaaaatgttagaaattgagtcaagtttatttatttgttaatatgattaattgtaataaaaagtctattcttagaatattattcatttataactataacgagttataattttcaccggctagattgagtgatttttcatcaatttatctatcaataaagagcttctgattatgcatgagtcattaacaatcgcgctattgcaagcacgggaatctgcgatgggattttttcgccccgttcttaaagagcataatctgacagagcagcagtggcggatcatccgagttcttgctgataagcgctctatcgattttcacgaattagcacaaaaaacctgtatcctgcgtccaagtttgacaggtattttgattagaatggaaagagatgagctaatttgtcgattaaaaccagtgagtgatcaacgtaaattattcgtttctctatcaaccaatgggcaaaatttatatgataaaatccagcctaagatagaagaagggtaccaattactcgaacaaaagttttctacagaaaaactgcaacatttatctatcttactgaaagaactgatagcgttaaatccagaaaatagtcattcaactgaaaaataacatgtgtgcaccaagaaaaaagagatgatgttataccatcatctcttttgtttttatgtaataggtgaaattaccttttacctaatacgtgtaagaagtgaatatgtttttcatactgatcgagtatgtcatgaataatttgttcttttgtccagcccatgacatcgtaatcttgcccaccttctttgagatgaatttcagcacgatagtatttatgctcttcatctttttcttcatctgttaagcctgctagcgcgaaagcgggttgagtatagaatcgtaatcgtacttcataaaagaagttcatatcctcacctaagtccacttcaaagccgatgcgatcttcttcttcgtcatggatatagcattgaataccttgtttgcttaattctgccgacaccatttccatggaaggattaacgacttcttccataaaacgttttacatgtgaacgtttaggaaaataagcaatatttcttaatcgacgttgccaaggaataggattacggctagccggtggggcgatagtcgtcatctgttggctatctcgcttataaacatccactcgcaatgccttaattaatccataaattgatgccaatagcacgatggcaaatggtaacgcactggcaatggtgacagtttgtaatgctgataaacctcctgccaataacaaggtaatggctgaaatacccattaatgcagcccagaagatacgttgccatacaggggtttctgaatctcctcctgacgctagggtatcaaccaccattgcaccggagtctgctgaggtgacaaaaaagacaatgaccatcagcattgcgacaaaggaaagcactgatgagaatggaaaatagtttaagaattcaaacagtgctaatgacacatcttgttgtactatattcgcaagaacttctgcacctttatctttaattaaatagatagcggtattaccaaagacagtcatccaaagtaaggtaaagccagctggaacaaagagtacgccgacaacaaactcacgaatagtacgaccacgggagatccgtgcaataaacataccgacaaaaggcgaccacgataaccaccagccccaataaagcagtgtccatccacctaaccaatcacttgattttggttcgtaggcataaagattaaacgttttactcactatttctgataaatagccccctgtattttcaacaaacgattttaaaatcaatacagtagggccaagaataatgactaataaaagaagaataacggctaaaccaaggttaagctcggataaaaaacggatacctttttctaatccagagacaaccgaaatagtagcaagcccggtgataacaacaattaaaaccacttgcacggttggattaattggaatatcgaatagatggtttaaaccggcattaacttgtagaacaccaaaacccagtgaagttgcgacaccaaatacggtgcccatcacagcaaaaatatctaccgcatgcccaatagggccataaatacggtcgccaatgataggataaagggcggaacgtaacgttaatggcaagccatggcggtagctaaaaaacgccagaattaatgccacgatggcgtaaatagcccaagcatgtaatccccagtggaagaaagtcaaacgcatagcttctttggcggcttcaatcgtctgcgcatcccctgtgggtggcattaaatagtgcataacgggttctgcgacaccaaagaacatcagcccaatacccatacctgctgaaaacagcatcgcgaaccaagcaaaatagctaaaatgtggacgagcatgatcagggcctaattttatttcgccaaagcgcgatagccctaaataagtcacactcagcaaaaccaatgctacggctaaaatataaaaccagctcgcgttggtgaaaaggttttcctgaaggtgccctagcttgtcattagcgagttcaggaaatagcgctgaaaaccctacgacgagcataataagtattgcggaggtgtaaaatacgggaggattaattttcatcctaattttttttggtgtgatttcattttgttggctcatagttaacctatttttgttatttttcttagacaagacttttcgatattgcaatctagcatgttagtggtatcgctaggaaagaaaagtttgtaagaaaatttgaataaaacatcagatgatcttgaagctttataaaagaacggaaataaattatatttttccgtaaggtgaagaaaattacaattaaatcaatttattatcatatgtttttagtcagcgtcttgacgctttaataggtttctcctgttgaaaaaaggatagtatggttacattttttgcttaatcgatcaactcctgtttgttttttgcacaaaaaaagccagtaaaatattactggctttttcaacatcaaaatttctgaaatgaaattatttattatcagcctttagagaatcaattttttgctttgcttgatcggtgagctcatcggctttatcaagcgctttatctttagtatcttgcgcttgctgttttacatcatcactggttttagccgcatcttcttttagttgcgctgctttgtcgctagcattttgttttaagttatctgcagtggtattagcgttttgtttcacttcttctgctttaccagccagtttgtcactttcattatttaaactttgtttgatttcatctgcttttgcacttgcagaatcttttagttcatctgttttttgtgcaatgctctcttttaatgcatcggttttttgatcggcttgtgctttaagctctgcagctttatcttcagcttgctcttttagcttggccgcatcttgttttaattcgtcagctgtcgctgatgcactctcttttaaatcagcggctttttctttagcttgatctgttaattcttttgctttgtcttgagccgtttcatttacttgggttgctgtctcttttgctttatcaataccttcatccacttttttcgatgaatcatcacaacctgctgtaatggtaacaagacctgctagaattaaagatgccagtaattttttgttcatgtttctctccagagaatgtatccaaaacatatcgatgatatctcgcataactagtattaaaagcgagaggttattgagttgatattttatatattatcttaactcccaataaaataagtatagtgagagtctgaaaatcaacaaggttaagtatattaagtgattaccactagtcaaatatattagatttgtaaggttaatatctgtcagatttctctcaatggtatgttttatgctttataattacagtgtgaatcgttttgcaaaggtgcttaagaaatggaatattatctgcttgtggttatcaagtttattattggttttacaataattttggctcatatgaatatttcagggaagacacaactctctcaactaactcccattgattttattggtaattttgttttaggggggattatgggaggggttatttacacagatgcaatcccgctttaccaatatgttattgtctttttgataggtgtattttttatttcttttctcaattatatcagtaaaaaatttaattttttccgagcagtagcgataggtaatccgatcccgattattaaaaagggaagatttattatggaaaacattactgagaagaaaaataagattgatattcttaatatcacttctaggttacatgcccaaggaattcattcttttcaagaagttaattatgctcaaattgaacctgatggacaaataacggtggtgtgtgatggtgctaaaatgccctctatcattattatgaaagatggtgttatccgaacttctgaacttgagcagatagaacgagatgaaaattggttaaacgaagagatgaaaaaacaacatatagataacccagaagatgtttttttagccgaattttgggatggtaaagtcaatttcattttgcaagacggtaagatcaaacacgatttcattccgactgctgagtagcaatatcctgtgaaagaataaaagcaacgattaatactatctcaagagtcgctatcgttgctctattttgatttagtattagttaaagtttgaatgtctcaaaatcactggcgatttgtgtattgtcaaatatagtatgacattccgctaatagctcgggggtttctttaggtgaatagcgactactgatatgagtaatgattaatcgcttagcattcgcttttttggctaactcagctgcctgtatggtacttgaatgtccacgactattggctttatcagccatatcatgtttaaaggttgcttcatggacaataacatcggcattctcagcgagtttaactgcattaggcgttggttgtgtatcgccaaaaatcacaatacaacgacctttgatctctgtgcttagataatcttttccatcaatgatccgtccatcaggtagcgtaacggttttcccttgttttaataatttataccaagggcctctaggaatattctctgtctctagcttgtcagcattgagtttacccggtttattgtcttcttctagacgataaccaaagcaggggacaggatgtgataatgcgccacaacttgcgcgtataccttcttcttcaaaaagaaaaccatcttgttctatttcaataatatctaaagggtaagtgagataagattggcttaatgtaagggctgtttctataaatgccttaatgcccgtaggcccataaatggttaacgggttttctgtgccccccattgaacggctacagagtagtccgggtaaaccaaaaatatgatcaccatgtaaatgggtaataaaaatcttattgatgcgtgatagctttacatggctatgtaagatctgatgctgggtcgcctctccacaatcgaacatccacagacttttttgtttattttgtaaatcaagcaccatactggtgacgttgcgatctttagaaggcacgcctgcattagtgcctaaaaaggtaagttccataatgaaatcctgatctccatggtgaatttttaacattcatcttaatcgtaatggtatctaaactaaataaaattctgcaactgtgattaaggtaatcttctcattaaagttgatatgaataatagtgtgaataaaagataatatactttatttactaaaattaaatttctctgattaacgatttaaatgtatctgtttttatacaaacagaatgaatggggcatattcttaatttgtttattttttttaataaagtttaaagttcttattgaaaaaataaaaaaagtaaaatttaaattatgattttttgagtaaataaacatatcttacaaattgaaatactttttgtgttttttttacaattttagtttttaatttttatcttaaaaagttgttttgttaatacaatgtaatgatattaattctgtctaatcagaaaatattccattatgaaggtttaatttctatatagttcttttttattatttggttacagcattatttaattttattatgtctatttcttagtaagttaatgctttcaattttctaattaatttcttgtttttcatgctgttaaatttaaccgcaatatttcaaaacaaccttttagttttaaattctattaaaaataatttattggttttttattctgaaaaatcatcgttattgaataataaaagttataatattgtatcttttttgtacttatatgtaaatttatggttatttgtttttttgttataatattaaaataataaaatttatttctatttataaaaatatatttcctttaattttttacactttatatctaagtattttgtatttaaaagtctataaatattctttttatgatgctatttttggtttttttatctaattacttattttgggggtaattataatttgcgtaagatgaaaaaaaatccaattaatatcagtgtattaataaatatatatttaattaaatttatcaggtttgacttaaataaagtggcagagaataataaacccaacttgatatgagcgttatctaatttcggttgttaattattatttattttatgtattgatgattaattatagagattaatttttacaatatatcaagatataccaaattcattgcgtatcttattcataaaagagaagtgtatcgcctgtatgggattatttttcttaattgaatgttgttgcttttatactttatttaacttttatattttaggaaaacaaaatgaaattaaaaaaactgcatttagttttagggttaggcttatctatcattgcgggctctgcattagcggcagatcaagggcatggtactgttgaattctatggttcaattattgatgctccttgttctatcgatcctgattcaggtgctcaacgtattccattaggtcaagtgtcatctagcgcactgaaagacggtggccgtagtgcatcaaaaatgtttaaaatcaaattattacagtgttctactgagacatataaaacagtcaaaacaacctttaccggtgctgaagctcctgatgttttagagggggctttaggtattgaagggatcgccaaaaatgcagctgttgttatcaccaatgcaggtggtgaacaaatcaaattaggtcaagcaagtgccgcccaaacattgaatgacggtaacaatgacttaaattttgccgcttatttacaaggatcttcctcaaaagctgctattcctggtgattttacagcaatagccacttttgctttatcttatcaataatagtcgtcaaataaagctttgtataaggatatacaaggctttgttaattgatgagctttcttatcgttaggacacttttgtcatcgcgctagatatcgatggtgagtaatagtaaaacgcgctctttttataaatacaaaaggattatcaaacatagtgatatttcatccgtaggggcattactgataattgactgttttgggctcgaatattactaaatggattagttaggtttacttatggctaaattattcaagacgattgatttaaatgttaaacataaaagtaagcagtgcagaggtcgttctgctaccacactgatctatttcgtgattatagggatggcaagtattgccagcgattcatttgctgttagcaaagatattgaatttaactcagatattcttgacttaaaagatcgaggaaatattgatttatcaagcttttcccgagcgggatatattactcctggcaagtatgagttaattattaatattaataacaatgaattaagtggaacttatcgtgttgactatattgtgcccaaagatgatcccaaggcaagcgaaccttgtatctcacctatattagttaagcagtttgcactcagaccagaatggttaaaaaagttaacttggaaagataagggtaattgccttaatgaggcatcgttaccaggtatgagcctgaggacagatttaggtagtggggttttttttattactcttcctcaagcttatctagaatattcatcaccgaattgggagtcgccttctttttgggacgaaggtattgctggattattgtttgattataacgttaatgccaatgtcagagcgcctagtgatggcaagcagaaacagcagatcaccgcaaatggtacggcgggggcaaatttaggtgtttggcgttttcgggcagattggcaagcaagttatgagcacactacaggtgtattgcatagcacagaaaatcactggaattgggatcaattctatctttatcgagcgataacgaaatggggcgcccgtttagtcatgggggagacttacttacgttcaaacctattagataatttccgttttacgggaataagtttacttacggatgagcaaatgttgccccctaatttacgaggttatgctccagagatcacgggagttgcaaaaacgaatgcaaaagtcaccgtgagtcaacaaggacggattatctatgagacacaaatcgcgcctgggccatttcgtattcaagatctgcatgatgcggtaagtggacgcttggatgttcgtattgaagagcaggacggaacaatacaagaataccaaattgatacagccaatattccttatcttacaagaccgggacgccttcaatataaagtatctgcgggtaagccttctcgattagatcataaaactgaagggcctatttttgcaatgggagagttttcttggggagtgaataatggttggtctctttttggtggcactttagtttctaaggattataactcggcctcgctaggttttggacgagatctaatgatgttaggtgctatctcttttgatacgactcattcatgggcaaccttcgctaatgagaataaacactatcatggcagttcatatcgaattagctattcaaagcgttttgaatctattgatgggcaaatcacttttgcaggctatcgattctctgatcgtcattttatgagtatggatcaatatttagataggcgttatcgctatggcgcacaagaaaataataaagagctttatacccttacactgagtaaacaatttcctcaatggggacttagtacctatataaattataaccatcaaaggtattgggatcgaccgaataacgactattacaacttctctttatcaaagtatctcgctatcgggaagtttaaaaacattaacattagcttatccgcttatcgtaatcgttttaatggcaatcatgacaacggcgtgtatttcaacattaatttgccttggcgtgatagagcaacgataagttataactcggtcataaataaagaaggtaactcacataatgtcagctatttcgatcgcattgatgataacaataattatcgtctaagtgcaggagttagtagtcgaggtaaaccatcggctgatggtttctttacacattatggtgatgttgctttagtaacggcttcagccagtcatattaacggcgactatacttcggcatctttatctttccaaggtggggcaacattaaccactaaaggcggggattttcaccgtagcaatatgccgggagcaacccgtttgttaattgatactcaaggtgtttccgatgtcccggtaaaaagtcttagtgccatatctcataccaatatttttggcaaggcggtgatccccgatattaatcactattatcgaggcagtgcttctatcgatcttaaacagctaccagacaatgttgaagcactacgttctattcatcaattaactttgactgaaggcgctattggctatcgtcaatttgatgtgattgccggacacaaagcgatggcaacagtacagttggctgaaggaggcgctccgccatttgcagcgacagtaacaacgcttaatggtcgagaattaggtgtttttaacgacggtggaaaggtttatttaagcggtattaattcaggcgatgtcttgtatgtacattgggatggtaaaaaccaatgccaattatccattcctaaattggcggatacacaactgatcacatcactgcttttaacttgctttcaaagaaagccgactatttcaacatcattcctagaaacagataaaacgcaagcattacctcaacattcatttcttagtaaataacgctaagtaataacaataattgattgatagagagaagagtaattaaagatgatggcatctaaacatttatttatggtaactaccaccttattaactggaatggtgtttacgtcgcaagttggtgcgacaatcgctttagatcgtacacgtattatttttaatggtgctgataaatcagtaagtctgagtataagtaatcaaaacaaagaattaccttatttagctcaaggttggctagagaacgagcaaggagaaaaaatagaaacacctcttattgtattacctcctattcagcgtattgaacctgggaataagagccaagtgaaagtgcaatcattacctgatattgcacaactacctcaagatagagagagtgttttttattttaatttacgtgagatccctccacgtagtgataaacccaacgtattacaaattgcattacaaacgcggataaaattgttctatcgaccaaaatctatttatgccacccaaactgatttaagtaatccatggcaggaaaaaattaccttaacaaagcagggggagagttatgttgtgcataatcccacaccctattatatcactattgttgatggtctaacggatctgaaagggaaaagcttagaaggatttacccctatcatggtagcgcctcgagggtaggaaaaactcaatttaacggtttctacgctgggggcttctccggtattaagttacatcaatgattacggtggtcgtccaagattgaaatttagctgcgatagtcgtgaatgtaaggtgatagaaacagaccaaggaaattaataggtatatttatgaaacagcagattaataaaaatagtcttgtatcaatattggtactattgagcttttttatcacaacaaatgtaactgctgtgacaccggttttgtcaagtacgggactatcacaaaattcgcctattacacctatttatccgatccctatcaacataaaagggtacgttatcgctcaccctccttgcatgatcaatgagggcaaaacggtagaagtgaatttcggtgatgtgctaagtacacgagttgatggcttaaattacaaacgtctggttgattatcatccaagttgtgaacaaatgcccattaatacactaaaactttctgtcgaggggaatggtactttttttgatgccaatgcattaatgaccaatattaccggattaggtatacgtattttgtatcaaaataaaccacttaagttagggcaggcaattaattttacttatcccgatttccctgtattggaagcggtgcctgtgcgtgatttttctactcttcttgtgggaggagacttttctaccacagcgacattgcgcatggaatatcagtgaggagataacgggaatgtttaataaacagaggatattctttttcataacgttactttcatcattttcattaatggctgatgagacggcaaataaggcgacaatcactaacagcgaaaataatttgaggttatttggcacactatttattccccctccttgtgtgatccaaaacaatgacatgattgatgttaattttggtcaccaactgggaacgagtcgcatcgatggcattaattatacaaagaccgtcaattacacgttgcagtgtgaagaaaatgcaaatggttgggcattaggtttatccattatcggctctgcaagccaatttgatgcggctgctttacaaaccaatataacggatttagccgtacatctcacgatagatagtgagccatttattttaaataaacggtttgttattacctctgataaaccgccgattattttagctgtgcctgtaaaaaaatcaggaagtaccttaacaaaaggtgcatttgaggcaacagcaacgctacttgctgaatatcaataggagtatcgggatgatattacaaagattatctctgagtactgcaatctttgccactgtgatagctatggctaatgctgatcctaatatgcgttttcatggtgagttaattgatgagccatgtgtaataaaacccggtgatgaaattattgtcatcacgctggataaagtgactgatagtgctttttacaatggagtagaaagaactaaaagccagcaatttgagatccatctatcggagtgcgatctctctatgaataacaaagtttccatcacatttaaaggtgatgaaaataaggcgatggcagggaaaggttttctagcattgagtccaataagtcgagcctctggtattgctattggtctagaagatagcgatggagtcctcttacccattaatcagccatcaaaaaatatggctttgctttcaactaataacacattgaggtttagtgcttttatacaagcagaacctaccgcaattgctaatcaatcaataaaacgggggccttttagcgccattgctacattccatttaaattatgactaatgttgacttgaggtttatatgcttatacctaatcgccaattaatcttttacttatttactagcatgttgatatatccagcttcctctatagccgctattttttcttatattacagaatcaaaacctgtgggtaatgaggggacaggggctgattacacttttattatccagcgttgggatcccgagccaccaacggctttaaatccttgttataaaaaaaaaccttgttatataaccataaatcatcgtcatcagcctaaccagtctggaggttcagcgaccagaactattttaagtgatgggcataaatatcgaagaatggaagatctacgtattgctgttatgaaagaattaggaggattcccttatggcccaggagttgccattcatcgatatgttgatacatcaaccatacaagagtgcgttggtatattttatcagccaaatgcttatggttttgctgaagatggctatttattaccgggttctatttgtgcaattgctcccccacctgttggacattgtgatgtgttagcccattctgttgagttggattacggcaatgtgggggaaaatgagttagacaatgcggttcgttctcagactgtgaatgtgacgtgtaatcgtgatgtctctttacaggttgttgcaacaggaatgaataatcgtcaagtcccactacgtaatgacaatagcttatatgctgatttatatattaatgataaatctggcgaagagggagaggctatctttgtcgcaaaaggcaaaatggtttctatacaagtgagttctaaattgagaaccaatggacatgttgctccagggtatttttctggctctggcgcgttgattctaacgttaccataataataaaaggttgaaatatcatggtgaaatatcgtcgtgcaaatattgatgtcaatgcactggtaggtaagcgcatacaaaaaaggcgtaaagagttaggttacacaggtagccaattggcggcaaaactaggggttagccaacaacaattctcacgctatgagcgagggttaaacaaaatagatcttacttatctagtgctattagctaaattcttaaacacacctatttactggttttttgaggactgtattacttcaacgtcggtcaaaagtggcaaaccgctaagtcgacgaagcaatcttttagccaaaaaagcactagacgcatttctgtattaacctttacctcttacaagaaaaagtccttaaataagcaacctatttaggtcaggctaaggggatgttttcccttaatgatcgctatagcgatattgactgtcgagttatgttgcactcattaggcttgcaatcactatccctaagcgagcttagatgggtagtgattgctttatgagcattataaatgtgtagaaagagacgaaaaaatcagaattaattgtattttgaatatatctcttatactaagttaaattattaatgataaatctttttaatgtttttctgtgggtaaatggataccttctaagatagagtctattggaataaaaatgattatatttcaaaaaaaattagtacaccaaatatgaccgggtttattaaaatcaagtatcattaattaattctttattaagattactatcgtgattatttatattaaatgatataatttttaatataaatcctaatttgaattaaaaagaaaaaaatatctatattcttattgtaaaataaaacgtactcaattattgatattaactttttaagtaatctattaataaagaactattgtgagtttcgcgtttcccacatattgataaatcgttttgagttacttgctgtataaataaccgtatgggaaatattgcgatggcctaaatagtcttgaattaaacgtgtatctctgcctaaatccgccagtgcgtagccacaggcgtggcgtaacatatgagggtgtggactaatagaaacattggcttttttacctaaacggcgtaataacccataaacttgttgacgggaaattggtcccgttttttgtgataaaaatacccattcagaatctgattctctccagttttctctacttttcaaccagttgcataaggcttcatattcctcatcaataataggttgtgttgttgaaagcccaccttttaaacgcctgacatagagtattctactttctagatcaatatcgcttaatgttaaattacatagttcgctaacacgaaaaccatgtaaaaaacacattaaaaacatacagtaatctctttcgggatacctaccttccttagcttgctttaaaatagcattcacttcaaaacgtgtaagaaatttacgttgcttcattttcgtaaccttttcaattagataataaacaacaaaagtcagttgcagcatcactatagcaagtaatatgcatcaataaagggttgtgttttttttatactttcttttttactcgttaattttaaacaagtttattgaaagtttgccaatttttagaaaacgaaaaccattgataggtaagagaaaggagaatagcaggtgatatttacacctatttagagaaacaatcaaaatacaccaaattgtttactattattctccggcttctaacttaagtcaaatatattattgggtatatattcttaattatttaacatattgatattaaacaattttttaaaaaatcaaaataatttattactttgtgcaaaacactgaaataaatttttttacttttttaacaaactatagtatttgcacttagaattatatcatctttttcctaaattttaagatgaaaaaatctaaatagtcatacttgcaagatgaaaatctttaactaaacaatttggtgtattttgtttcgtttctaacgatatttcgcggcgtttgaagtggacttaaatataccaaaattcccgagctcaataaatgagccattcaattaggaataatccaatcctaaatgaattaattattttagatgtcttcatcctttatatttcaggaaacaaaaagatgaaattaaataaattagctttagttcttggtttaggtttatctgttgttgcgggttctgctttagctgcagatcaaggtcatggtactgttaaatttgttggttcaatcattgatgctccttgctcaattactcctgatactgaaaatcaaacagttccactaggtcaaatttctactgctgcattaaaagatggtggccgtagtaattctcgtgactttaaaatctctttagaaaattgtactacagagacttacaaaactgttcaaacaactttcactggctctgaagcaactgaagttttagaaggttctttaggcattgaaggtatcgctaaaaatgcagctgttgttatcaccgatgcgggtggtaaacaaatcaaattaggcaccccaagtgctgctcaaaacctgcgtgatggtaacaatgatctgaactttgctgcttatttacaaggttctgcatctgaagctgctgttccaggtgactttactgcaatcgcaactttcgcactgacttatcagtaagaaaaaataagttctgtacaaggaagtacagagctttaattcctgtctttacttttaatgatttttcttactaacggagaaaaatatgaatcgcaagatggcaccactattgctatgccttgttgccagtttagtgactgcgccaacgatagccagtgatgtaaaacaagataaaaacatgcatcagcgatttgggtggctcaatctacaaggaaccatattagagccgtcatgtgcaatatcagcgggaagtagtgatcaagtgatcccgctaacgacggtatctatcccaacgttagtcactgaaggtcaaggaccgattgaatatttttctatcagattaacggactgtacgctaattagccagaaagggcaagaagcggataatccacgttttatcgcaacgttcgatggtccttctaatggaaatggcaactttgagttatccggtgaggccaaaggtgcttcattagcgatagcggatcgttatggtcgacaagctattccaggacaacccctaccgcccgttggcattgattcgcagtcaatggcattgctgtaccaagctcgaatagtcaaaaataacgatacgccaaaagcggggaattaccgtacgacgctgcgctttaagctggaatactattaaatggatcagggttggataatttatggttagatcattcaaaaccgtttgtttagagaagcgagaaaagagaaaaaagcatgctattcggcctgttgctatattgatctatttaattgttactggggcatccagtctttcaaattcagctttagcgaatagcgatattgagtttaatgctgatattttagatcttaaagataaacaaaatatcgatttatctgatttctctcgagctggctatattatgccagggcgctacgaatttgttgttcgtataaataataatgaacttcccgatatctacaacattaattatgttgtacctgcagatgatcccaaaggaagtgaaccttgcttacctcctgaattagttcgtcaattaggactaaaaccagagtggcttgataaaattcgttttaacgataatcaaacttgccttgatacatcatctattcccggaatgacaataaatgccagtttaggtagtggtaatttattattaacgatacctcaagcttatttggagtattcagcaccaaactgggatccgccttctcgttgggatgacggtatttcagggatactttttgattataacgtcaatgcaaatgtgactgatcctgctaaaggaaaacaacgtcagcaagtgacggggttaggtacgttaggggcgaacttaggtgcttggcgttttcgcgctgattggcaagcgagctaccaacatacgacagggatccctcaaagtacagaaaacagctggaaatggaatcaatactatctctatagagctatccctcaatgggaagcgcgctttgtcatgggagagacttactcgcgctccgatatttttgatagtttccgttttaccggggttcatctcgcaactgacgacaatatgttgccacctaatttacgtggatatgcgccagaagtcacaggtgtagcaaaaaccaatgccaaagtgacaattagccaacagggtcgagtgatctacgagacgcaagttgctccaggaccatttcgtattcaagatattaatgatgccgttagcggtaaattagatgtacgtgtcgaagagcaagatggctctgtacaagagtttcaaatggatacggcaagtattccttatttaactcgaccaggacgagtgcaatataaattctcggcaggtaaaccttctaatattgaccataataccgaaggccccgtttttggtatgggggaattttcatggggggtgagtaacggttggtcactttatgggggctcaattgttgcgggtgattataacgccttgtctgcgggtatcggccgtgacttaatggcttttggtgctctctcttttgatgctactcactcttgggcaaaaattcctcgtgatgataagcgttataacggtggctcttatcgattaagttattcaaaacgttttgaagctattaatagccaagtcacctttgctggttatcgcttctcagaacgcgactttatgaccatggatcagtatttagagcgtcgctatcgcgatggtaatgctgataataacaaagaactttataccattatgtttagtaagcaatttcctgactggggattgagtacttacttaaactatagtcaccaaacatattggaataagccaactaatgataattacaacttatcgttagcgaaaagcgcggatattggtcgttttaaaaatatcaattttagtctctccgctttccgtaataaatttaatggcaccaatgataatggcgtttatatgaatgtcagtatgccttggggtgatcgtgcgaccatcagttacaacactgtcattaataagagcggtaactctcataatgtcagctattacgatcgaattgatgacaatagcagttatcgtgttggcgctggggtaagtagcaatggtaaaccttcagccgatgcttattttatgcattatgctgatgcggccttagtcaccgccagtgcaagtcatatcaatggtgaatatacctctgccactttatcgctacaaggtggtgccacacttacgccgaaaggtggagcattacaccgcgttagtcgtacaggtagtactcgcttacttattgatacagacggtatcgctaatattcccgtgaagaattttggtgcgatttcccataccaatatgtttggtaaagcggtattgccagatattaatgattactaccgtagtagcgcgagtatcgatcttaatcgattacctgaaaatgtcgaagcattacgctcaattcagcaattaaccctaaccgaaggggcgattggttaccgtcgatttgatgttatcgaagggcaaaaagccatggcggttattcggttaaaagatggaaccttcccaccatttggtgccagtgtcacaacagaaaaagggcgtgagttaggcatcattaatgatggtggaaatgtttatctaaccggtattaataccggggatgtattgagtgttcgttggagtggtaaagagcagtgcaaagtacttattccaacattggtggagaatgtgcaaatttcatcactgttattgacctgtagtgatgatggcacagcaacctctactttcaatcaaagagaagtctccttacctaaaacgaagtttctatctcgttaaggttaaggaacaggaaataaagataaaaacaacttcagacaaagagtaattaaagatgatgttattaaaacgctcatgcattgttgcaaccactttgttaatgggaatggcatttactcatcaagctgttgctgccattgcgctagatcgaactcgtgtcatttttaatggtgccgaaaaatcgattagtttaaatgtcagcaatcaaaataaggacttgccttatcttgctcaaggctggatggaaaatgaaaacggcgaacgtattgaaagcccactgattgttttacccccgatccaacgtattgaaccgggtgataaaagtcagattaaggtgcaatcattacctgatatagccaaattaccacaagatagagaaagtgttttctattttaacctacgtgaaattccaccacgtagtaataagcctaatgtactgcaaattgcattacaaacgcggatcaaattattttatcgtcctgcatcaatctatgcctcgcaaacggatttaaccaatccttggcaagagcagatcactttaactaaaaaaggtgatcgcttcgaagtgaataatccaacgccttactatgtgacattagtcgatggattaaccagtttgaaaggaaaaagcttggatggctttgaaccattaatgatcgcacctaaaagtagcggcacgataaatctgagtgcttccatgtttggtgcttcaccggtattgagctacatcaatgattatggcggtcgccctcagatgaaattcacctgtagtggcaatcaatgcaaagtaacagaaacggcagctggaaactaaataggtctgatttatggttatggaacagtggtttagcccaagcaaggcagtgttggtttttattctggcaacatttactggaggcctgagttctactgctgttgctaacttacctgcaggagcagtaataagagcgacccccgggattgtttatatcaatattactggaaacgtcatcgctccacctccttgcttaatcaatgacggcaagatgatcgaggtgaattttggcgaagtaatgagtacgcgtattaatgatagcaattataagcaacctatcgaatataccgcgacttgccaaaaaagaccgactaacgccatgaaagtctatataacaggtaatgcaacagggttcgatagtaatgccctacaaactaatattacgggattaggggtacgcattctttatcaaggtaaattattaggattaggctcagcggttaaatttacctatcccaatttgcctaaactagaagcgatccctgtgcgtgataatagagaaacactagttggtggagattttgttgccaatgccacacttcatgtagattatcagtaaaggggcaacacgatgaataaattgcaatctatttgtctgattatattactaaattctacagcagtaatggcggccgactcgcctaatttaaaattattcggaacattattagtgccacctccttgtgttatcagcaatgacgaacgaattgaggttttttttggtaagaacgtcggtattaataaagttgatggtattaactataccgaatcggtgaattataccttggtatgcgacgctaatttaaaaggttgggatttgggattatcaattatcggacctaaaacccagtttgatgaggcggcattgcaaaccaatattccagatttaggtattcatttaactcaagatggtaagccttttaagctaaatgagcgtattgcgatttcaccagattcgcctccggttattcaagctgttccagtaaaaagaccgggaagtacattgcctgaaggggcatttgaagtctcagccaccttattagcagaataccaataggagcgttttgatgaaaataaaaacattatcgatccggttcatattgggtctatctgtatccatagggttaacttcagcggcttttgcaataccggacaacctctattttcacggcatattagttgatgagccttgtaccataaaaccgggtgatgaaaccgtggtactcgattttggcaatattcctgataaaaacctttatgcctataaaagaacgccaagcaagttatttcaattacgtctgtcagaatgcgatctctcaatcggtaaaagcgtcaaaataacctttaaaggagaggaaaaccaagcaatggcaggagaaggatttttggcaataagtccgggcagccaagcttctggtattgcggtgggattagagtctgaaaatggtaatgctctacctataaataaagaaacagacaagatgtcattaactgcgggtgacactattttgaatttttatgcctttattcaaggtgagccggatgcgattgcgaataagtcgattaaacgtggtccttttagtgcaatagccaccttctatttgaattatgactgataatgaagattgaggttttacatgtttatatttaaacgatttccggcgatatttatcttaatagcggggcttttctcagcacctgcgatggcctctattttttcttatataacagaatcaacagggacaccttctaacgccacttacacttatgttattgagcgttgggatccagaaacctcaggaatattaaatccttgttatggttggcctgtgtgttatgtcacagtgaaccataaacatacagtaaatggtactgggggaaatcctgcatttcagattgctcgaattgaaaaactacgtactttagctgaagttcgtgatgtagtacttaaaaatagatcattccctattgaagggcaaaccacccacagagggccttcattaaactctaatcaagagtgtgtgggattattttatcaaccgaattcaagtggtatatcacctcgaggaaaactcttaccaggttcactatgcggtatcgcaccaccaccagtgggtgcttgtaaaatatctgaaggtgcggtgaaccttaactatggtgatattgatgaagctagtttaagtggtgctaagcgctctgaaacaatcaatgtaacctgtaatttagcaatgaaagtgttggttatcgcatctggctctgatagtgggcgggtacctctgcgtgcagataagagtttatatgctgatttatatctaaacaattatcctggtgaaaaaggcgttacggtaaatgttccagcaggcggttcagcgccagtctctgtgagttcaacgctacgcacgaatggacgggtagctccaggtcgtttctccggttccggttcaattattttaaccatgccttaatcatgataatgggtgaatattatgatgatgaattttgattttgcgaatatagatgtaaatgcttctgtaggtaaaaagatccaaaaaaaacgtaaagagctgggttataccggtatgcagctggctaaaaaaattggtgtcagccagcaacagttttctcgctatgaacgaggtatgaacaaaatagatctcagacatttagtgttgttagctctctatttaaatacacccatttattggttttttgaggattgctacgtaaaaaagccttcattaaataataaaggaatagataagcgcaattatgttattgctcaagcaacacctgatgcttttcattattgatattcagtcgatatgacatattgatgttttgctagatattacatttctttgattgattaccttattggtagggcaagggcaaccttgccgtttttttatgttgaaagctgacttattttatctcttctaatacacccatttattatttttctattatttactacgctattattaggcttttctcctattttattatcataccgcttagtcacaaatagacttcttttttaacatctcttagttaattcttgtaatgatgtgactataaatagtaatttcagccgttattatcaggtttattagagtattcgaagctttttatgtactttttaaggagtttttagttctgtaaaggttaataaatagactttaaaatgttaaaaagtgttaacttgcgcgcattttttaattttagatattataaattgattttaatgtttgttatctataattgatagtatgttttttaacttattgttttgtattaattaaattatgttttttttcattgtttgagtgttaattttagataatatcatttatatgataggtatttacggatagtaaaaacaaatttggttgtgtactgtgcattttctgtttttttataaaaaggataaatcatgcaaacaaaaaaacagggaggaagtcgttttctacgcacagtggaatggcttggaaatgcactcccccatcccgttattttatttattattttaattgctattttacttgtatcttcagcggttggtgaatacttcggcgttacagtacaagatccacgaccagaaggcgctaaagggcgcgctgaagatggttatattcatattatcagtttacttgatgctgatggtatacgacgtattcttgctaatattgttaccaattttacagggtttgctcctttaggaaccgtactggtggctttactcggtgtcggaatagctgaacgagcgggattattatcagccgttatgcgtttagtggttatgaaagctccacgcaaaatgaccacattagccattgtatttgcaggtattatgtcaaatactgcagctgaattaggatatgttgtcttgatcccgctatcggcaattattttccattcgctaggtcgtcatccattagcggggattgctgctgcgtttgcgggagtatctggcggatattcagctaacttactgttagggactatcgatccattattatcaggtattacacaacaagcagcacgcattattgacccaagctatattgttggtgcggaagcaaactggtactttatgtttgtcagcacctttttaattacatttttaggctacatcatcacagaaaaaatcgttgagcctcagttagggccttataatggtaatgaattagatgatgaagaaactgatctaaaaaatgctgcgcaagttacccctcttgagaaaaaagcactatgggcagcaacaggaacatttattgtgatggccatcattctggcattcactgtcgtacctgaaaatggcatattaagaaaccaagaaacaggtttaattggtaactcaccattcttaaaatccattgttgtattcattttcttattttttgctatccccggtattgtttatggttggatagctaagactatgcgttcagataaagatattgtcgatgccatggcaaactctatgagcacattaggtctttatttagtaattattttctttgctgctcaatttgtggctttttttggctggacaaatatagggcaagtgatcgctgttaaaggtgcggctttacttaatagtattgatatgccaagtgggttgctatttttgggctttattttaatttgcgcctttatcaatttaatgattggttcagcttccgcgcaatgggcagtaacggcgcctatttttgttcctatgttaatgctggcaggttatgcaccagaaactattcaagcagcttatcgtataggtgattcggtgacgaatattattacgccaatgatgagttactttggtttaatcttagcggttgccacaaaatataagaaagatacgggtattggaactatgatctcgatgatgttgccatattctattatcttcttaattggttggtcactgttattctacctttgggtatttgttttccacttacctgtagggcctggatcgccaatttattattcaccgcatgcgggataatattattctttagataagcttatacaaggatgtataggcttatttgtgtttatctttatgtgttgctaacttttctgttaattgggttgcatagtccgtatgtagaaactgtgtgtccattcctgcctgttgtaattttaattcgagtaaagtgagttttttttgtaactgttcatctttgatgccagtttctgaaagtgaacttaatatttcggctaaagataatgcatcttttctatcttgcatttctgggggcaaaaagccggcattcttaagcaaatgataactagtccgcaaagactcaggaacatgactgttatcatctaataccaagggtttaccttctcctggcaaagaagagagttcaccatttttcaacgccttttcaatgtggcgctccgcccattcatcaagaattgacattattcagcctcaacattaatgactaatgtaatcaataaaataacaaacttaatttcacttgatcaaatcacataaaatgatattatatttttatattatataaaaatatatattgttatagggagagtaaaatgagcaagtaccaagaaatagtaacagacatctcggggaatatgggggcattatctaaaaatattcctgaagttatgaagtcatttatgagtaccaccaaagcaagctctaaagatggtgtgctcgatgctaaaaccaaagagctgattgctattgccattgctgttgctaatcgttgcgatggttgtataggttttcatactaaaaccctagttgaattagggacgacagagcaggagcttgcagaagcattgggcgtcgcgatttatatgggagggggcccttctgtgatgtatgcgtccaataccatgggggcttttaaagaatttagtcaatagtatttaataaaatttagttatcattatagccagcatattgctggctttttgggttttaaagcttatagtggctcacttatattttagtttttcttaatgattactaatggtattagttatattcgtgaaatgccaaaaggaaattattattgataacctttttttataaaaacataaaggaattgtgagtatttttacgtaaaaaaataaaagataacaatttgatttttaataatatttttttatttctctctttttattaataaagctttaataaatatatttgaattttttataaaatattatgactaattgatgttgataaataatgtagtgcgtttatttgaggaattatgaatatagcgatgacagaaagatataaatggttattgtttttcctatttatcttattaacttattttattcctttagaaacgcgactgttatggcaaccagatgaaattcgttatgctgaaattagccgtgaaatgttagtttctggcaattggtcagtgccttatcttcttgatattcgttattttgaaaaacctgttttaggatattggatcaattgtattgctcaatggctatttggtgaaagccattttgcggtgcgtattgttgtagtaacatcaaccttattaacaggatggcttatttataaagcggcaatggtagtttggcgcaatagcgctcttgcttttaatgctatgaccgtttttttatcttcttttctggtattagcaataggtacttataatatattagatcctattgtgacgctgtttgtgaccgctgcaatgtactcatttttagttgcgttatcgaccccgaataaaaagggcaaaataattgcttatatgggtattggctttttttgcgcacttggttttttaacaaaaggctttattgcggttgttttacctgcattagtttttttagtcatggcaattagtcaagctcgctttaaagaagtggtttgctattcctctattgcactgttagctctcgctattaccgctggaccttgggtgattactgttgcattacaagcaccggattattggaattattttttctgggttgaacatgtacagcgttttattgctaaagagtctgctcgctcacaaccaacgtggttctatatcccgatagttatattgggtgtattgccttggctaggttttttatttggtgcattaaaatcagctttctctttaaaaaaaggtacactctattttctgctgtggtttactctcttttttgcttttttctcagcctcaaaaggaaaactattaacctatatgctaccgtgctttgtgccattatctattttaattgcacactatatcgaagagttaaaagatagacctgatgagaaaattagcaaagtgaatgcatctatcaatattgcttttgggctaatgggtatatcagccgttatctattctttatacagtgccaaatttgcgctttatgatacgaatgaaacgttaaaaatagtgttagcaataagtgggtttttattttggagtgtgattggtgcgggggcgctgtttagacaaacacagtttttaacgatgttttgctctatcggactaagtttagttattggctatgcaatcccagaaaagatagaaagtaggagtacaccagaaaatattatccaacgttattatgagcctttgagtaataaatcgtatcttttaacggacgaagttggtattggtacatcacttgcttggggactaaaacgtactgatattcgtttaacagagacgaaaggtgagttggcttatggtttaaattacccagatgtaaaaaataaatactatagccttgaacagctattagcattaattgaagcaaaccaatataaaggggtagcgattgttttagtcagacctgatagaaagcagattttgactaaattgactacattaaaggaaaagccgatagtagaaaaagagggcgatttaacgctggtgttctttaattagctgaattgctttaatatttattttgctgtgatgttttttctcagtgagtattgatcatgtattacgattttgcttttcgtgtgatttatatgtgatctagattaaaaaacagaatttgtcggtaaatatattttgctctttgtcgttttaatggtaggtttaaaatgtgtccattagaacggagttagctaagcactatatgacaagtcacttaactttatcagaacccccacccagacaaaatgtactcatgaatagggggaatttatgctgatttttttaactgaatgtattatcggtctggcatcaattgctcttactcaccgtgtattaatgttgtacggtaataaaaagaagtgatgaaaatacgatatgctaataagctaagtaacctattagactaactatcatagacgcaaagccctataacctgattaattatagggcttttattatagtattgagttaaattaaatatatattttcagctactgaaaatagttttcaataatttttattttttcaatatctagagtattggtatattgatgtaataatgcccaagcttgaatataatcatatttggctttgattaaatcttgctgcgctctatataaaagctcttccgcattaagcacatcaaccatcgttcgctgaccaccaatatagctttttcgtgttgcatttaattgtaacttagcggaactaacggcttgctcaaaagccatcaatttaatatggctcgttgagcaaatttgatattgatatcttaattcctgcataatattttgaataatagcatccctttcaaatgcactcatctgatattttgctgtcgactgacgcattgatgccgttgttttacccccattaaataaaggcatactgacataaaaacccacgttagcagattggtatttctggttaatggtattattactatcagaattactactagagtaagccgcataaaattgtactgttgggaaaaattctcctctatttttctcaatctcttgtttagctatcgccatttcatgacgagcagattgtatctttaagttattttgtatggcatttttttcccatgtggaatagtcatcgggagccagtgattgaagaacaaactttgtatcagttagctttgcgatgtgctcatgagtaggcaattgtgaaccgatcatagcactgagtttgtttttagccttttcaatttctaattgaagatcggtatattgtgactgggttaaatataaacgagtctctatttcagcaatatctgttttggttccttctcctaactcaaataggcgttgacttgaagctagttgtttttgatagatttcttgctgtgcttgatttagcaataatttatcttgtgtataagcaacttgaatataattatcaataagtcgaataattaattctgaaaatttattttgataatgactgtctgctaataatgttttaatgatagaagctttgtattcactaaatgcggtgtagtcaaatagtggttgactaataatcgcgttgacagaatagctttgatagttttgatactcaactgttgttattttatcctgaaatatatttattggataagccttacgttgccagttgcgaggattatttttgtaattgacagaaatattgggtagcaattgtgataacccgatattttcatactctttacctgctacttgctcttttaccgcagcattaaatgtgggatcatgtttaatcgctaaaaaatagagatcagacagtgtaaccgctgaagctggcaagcttaggagtcctacggaaaaaagtgtaaaaagtttttttattagcatcattattcttccgttaatgaagtatggagcctatccaatactggtttgaaaagataatttaataatgagcgatcgccagttttaataaatacatcaacgggcatacctgctttcaatttatttttattatctgctaataatgtataatcttttatgttaataagaacttgataatatggctcagttgttcgttcatcaattaatctatcggcagaaataatcgttacttcaccaggaatttttggcgtggtattttgattaaaggcactaaagatcaaatcaacgggaaggccaggagttaccttatcaataagatgcggagcaagacgcgcttcaataacaagttgatgatcttcaggcactatatccatcaatgtctgacctgtttttacaaagccaccttgggtaaaaacagaaagatccatcacagtacccgatatcggtgcgataattgccattttagctaatttatctgtttctataataagttgtttttctgtttcactgatttgtaattgtattttatttagctctgttcgagctagttggtggaaattggcattacgttgcaatattctttgctcatattctaatttttgtttttctaatgcacttatttgcccaaaagtctcgttgagttgattattattttctgctaattctcgcaccatttcttgatatcgatgacgaggaatatatccttcattagctaatatttgtaaatcattaagctgattttgtagattactaatttgactctttttattctgaattgagcgctttagatgggttaggcgaccagtaatgccatcgatagctgctttataaccatttatttcacttattaattctgcacttttttcatttaataaacgattttgttgtagtaataacttctctctattttcagtagatgaatagtatttatcgctattatttaatttaaatgaagtttgttgattaagttcagcgtataatctttgttgagtgatcagtaaattatcatattgctctgataacgattttactaaggcttgagattgaatagggcttagttgtatcagggtttgtccggcagataccggatcaccattttttacaaaaatatgagtaataataccttcaacagaagactgtacactttttttattccccgatattactacgtttcctattgcaggaacgcctttatcaaggggcgcgaaagcagcccaaaaaataaaaattgctaagcctaataaaaccacagtccatccaataacgagaaatttctttggatcatctgaaattttttctgacagtggtataacatttttttctatagtcataatcaattccgaaaaattaagcgttatttgaggttgctggtgttgaagaaatagtgtttgccgtttttgtgatagttggattatttaattcagcaataacagacgccgttggaccgaataatttggtgtttccatcaaatatcactaataatttattagtgacagaaagtagctgtttttggtgggtaattaaaataacggtttttttatgctgttttaatgtttcgatcgcctgtgttaacgctctaatacctaaatcatctaaattagaatttggctcatctaagacaactaacgtgggatcgccatataatgctctggctaatgcaatacgttgtttttgtccgccggataatccttcaccgtgagcaccaatttgggtttcatatccttgaggaaagcgtaaaatcatctcgtgtacatgtgccattttggcggcttggatcactttttgaggatcaacctcagtaaagcgtgcaatattttcagcgatagtgccggggaaaagggcgatttcttgaggtaaataaccaatatgtgggccaatttcttctttactccactgaaagatatccgcattatctaatcgcacaatgccttttttgacctgccatataccgacaataaattttgctaaagaagacttaccagaagcactcgggccaataatacctagtatatctcccggtaatagagcaaaattgatattatttagtaatattctgtcactgtgtggatacacggcttcatcgatattaacaagtaattggccttgaggcttaggtaaggccatttttttattttcttgagggtatgtttttaataaagttgtcaatcgattgtaggctgctttactactatcccaacttttccatacattgatcacttgctcaataggggctaatgctcgacctaaaagtattgaaccggcaatcatcattccaggactgatagtattatcaatagcaagccatccccctaaacctagcattaaagattgtaatgccatacgtgttacttttgtgatagcgttaataccagctgcattatcactggcttgtgtttgtgcttgtaaatatttgaaatgagaggtttgccattgtttacgtaattgactaagcattcccatcgcttcgatagtctgtggatgttctaaatgatgactttgtattagttgtgcttgattggcaaaattgttcgctttttttaaatgatttttagatagatattcattaaggatagccaaagcaaataagataagggcaccacaaagtgcaaataatcctaaccaaggattaaataaagtaataactaaaaggtaaatagggaaccaaggtagatcaaagaaagtgaatatggcatgactagtaatgaattgtcgtaaagtaattagatctgttaatgctaacgttggattaatattcgctattttgtttaatttttctcggtaagctgcagtataaatgcgtgaattaagtgataaatctaatttattactcatacgtataacaataatgcttcttaaatattctaatcctcccataaagataaaaagagctaacataatgattgttagcatcaatagtgtcatttcattacctgatggtaatactcgatcgtaaacttgtaacatataaatagaagggactaacattaatatattaattaaagcggtaaatagcccaatagagagaaaaacttttcgtctctcttttatgatacttgttatctcgttattatattttatttgtggcatgtggtattcctgatttaatttgtctatttttagtactaaatatcttttgttggtcttaaagaagcgtctattttcactttatttattattatgaatatcaaaatagcttcatttaaagcaaaagagagtaggagaaataactttctcctacccaactatgacttaaacaataaaatcagtttcgtaattaacaaaacctacgatatcaattttaaaatcaggattataattatagccataagcattaatggctaattcagaagcattggttacttcattatagctaagagttgcttcgccagcatttcctgtaaaattatcaacaaagttaagaattttgctactaaatgtatcttgaattaatgttgataaatcaattttatcaataccggttttgaaatccattattttatctgcggctgatactaaagaatctgcaatttctttataaataaaggtattgcttcctgtgccaccatgtaatgtatcttgtccacgaccaccataaatagtgttattaccactatggccatagataatatcgtctccttcgcctccaataagagtattatcagcatcattaccatgaataatatcattaccaaaaccaccaattgcgttttctatggtaacattttgtgcaatagaaacatttttctgtaatccccccacatcagaaaagttcccagcacgtaaatcaatcagttgatcttgatagaagcctgagaaatcaaatgtatcgttaccaccactatcccatacagagaaaattaatttatcattgctatcagtagccgtataataatcaatcccagtatttgaattgaaaccatatacatcatcacctgttctggtagtcgtatttgcgccatagagatattgcatagcagaaatatcatgaaggagaggggctccggcataagcaccttggaagtgggcgcctgtttcatattcatcccaatagctcattactgtatattggcgactatcttccgcataatcagattttaaataacctggaacattctgacctgcgttataatcaccaggatgcataagacccagtgtatgaccaatttcatggataatagttaaacgaccataattacccaattctggtgtagtattacctgcataatgataatcactaaaccatgcttggccagaaagatcttttccataagcataggtattaggcaatgttgcataagcctgaaatgtgccattgggatcatagatattaccaaaagtaatatctgtttttacgtcagaagccttcattccatcaacattcccaacagcaacttcagtaaatttaatatttgcaatgtcagaccatgcatctaaagattttcttgcatgctctttttgtaattcattaaattcataaggattcttattaccaaattgattaaatttgccttcccattttgggaatgaataagtcacctcagcgggttgcccaataacatatttgccattccaagtggaatcttcacgggctatatgttttcctgcggtatcataatcaaaagaaggtaatactttggttgaatagttatagaagatcccgcttttatctaataaatcagaaatattagataacccaacggctttttttaataaaaaagatcccataatatcctccagatataaatttaggttaagtttattttcatactgaaaatatatttatctggcgaatgccattgaggataaagatagacattaattattattaatctaggggggtaaaataagtttttaaataattgtgaagtaaagtgtgttttaagtcagaataatttaatgaggtgaatataagtatagttatattttatttttagatgatttctattgttagttattgttttataattgaaaggaaaattttacttaagtttgatttttaatttaattaatgggtttgtttaaaattaatgtatcgtttattatgttaagttgtttgatgtttgatgtttgatgtttgatgtttgatgtttgatgtttgatgtttgatgtttgatgtttgatgtttgatgtttgatgtttgatgtttgatgtttgatgtttgatgtttgatgtttgatgtttgttttatttctatagtaataataatattggtgaataataaacaaaataaaaataacataatgtattatttttatactgctaaaaaacagaacatctaaataaaaaaggactacaatataatcataatccttattgttaattagaataatatctttatatatctaaaagatcattgtaacttaatataccctcaagttttataaagatagtcgaatgatggtcgttattggctgttgaaatagttattgtggttttatttgtatgaatatcattatgtaaaactatttcattttcatttcctgataattgttctactcgtttcatttttgatatatcgatttttttataattttgatcaacaaaaataattttgtcttcattcgtattaaaatcaaaaattaaattataacttttagcgcctttatagcataagaagttaaaagtatcatttccttgttcaccatataatagattagtacctaatccacaataaaatatatcattcccttcaccaccttgaagttcatttcgtcctgcttttgatatcgaaaataatagatcattgcctttaccgccaatgaatgtattatttccataataatcaacaagggtatcatctccatcaccaccaaagagtttatcattacctttatttccatagaggtaatcattacccatactaccatggagaatatcattacccataccaccatggagaatatcatcacctatacctccatagagataatcattgcctatatcaccatagagaatatcattacccataccaccatagaggtgatcattacccaaaccacccttgatagtatcattaccatcaccacctataagttcattattagcactatttcctatgatagtatcatgacctgatccaccaatagcattttcaataatcgttttgtaggcaatagagatattactccgtaacccgccaatatctgaaaagctaccttcatttaggttaataacttgattaacggtatatagggaaaagtctaatgtatcaattccccccgaatcccaaatacaacttactaatttatcttctatgctttttaaggagtaagcgacacgtccggtattagaatgaaatccatagatattattttcaaggcgtgtggtcatattttcgccatagagttgttgcaataataatatatctagcagcataaaggtcatgggataaagaccaccaaaatcagcatgctctgaggttggtatatcataacccataacagaatatttcaatgaagctaatacatgatttttatctttatattctaagtattgccaactatggcttagcccgagtgcatgaccaacttcatgcaaaacaactttataatgatatgtacctggctgatatttattattttttagtgtttcaattagagtattggttttttttattatcagaacagtaccattatctttaaaattgaaagcatcaccaatattaccttctgtttttatataattatcaagatcattttgatgtattatcttataatattggtgtgatgataaatttaaaaatatagttccagagtattggtattgttcatcaatatttatcttttttataggggttgaatacctgctaggataggttgcaaaacctctggtggtatatgaaaattctattgaaccatgactaatatgaaaatcatcgtaaaaaccaaattttatatcggcatcgaattctggattagatgcaacaaactttgcttgtgttatataggcaatttcattaagaatatcggaaataacttcttgttgatgaggatatatggttgtttgtgtattataaaaataaggatgtatactattcttatttttattaatactattttctatatcctctatatctttttctaattcagctattttacttattgaatatttatttctataatattttaatgaagcgatttctttttcttttttttccttaagataggtcaattcatatactttagcggtatgttttattgattctattctatctttttctgttactgaatattttttatttgagtaatttctttttttatcataatcagggaatatatatgttattttggtgatattactatgtggttgtttaggccaaccatacatataatttataacaattttaccatcaggtagatagaaataagttggtttttttattgagttaaaactattcatactaaatccttttaccaaaagagaattttctatatttcttaattttataattaatggagatatatatgggaataaattttataaaaacacactatttattagtatgttttttagttgattactattaattatttatacgcatattatgctagattattattaatgtaataattgatggttatttatagagtaataatttaaaattttacaaatcatatggtgaaatgtatttataccgcaaagagttcatcgtggttaaatataccgacaatctctatatgtacaatggacttattgtcgttagaagatgttgaaacatctatgatggtcttattggctggtttgttataatttaatgaaaattcatttttacttcctgataacttatcaacttttttcatttttgatatatctatttttctataatctctagtgatcaacgttattttatccttgtttttttcaaaatcccaaattgagctattgctttcaactccctcataacagaaaaaattaaaggcatcatttccttgtccacctgttatacgatgagttcctgtgcccaaatatatttcatcatcaccttctccccctagaatgatatttctacctggaagccctctatctgttgaggctacacagatccgatcattacccttaccaccatctaacatattagcaccataataatcgataagcatatcatctccatcatcaccatagagcacatcatttcccaattctccgtatataacatcgtttccagagccaccataaaataaatcattgccatcaccgccatagaataaatcattgccatcaccacctatgaggttattatcaaaaggatttcctatgagagtatcatcacctttaccaccaatcgcattttcaataatcgttttataggcaatagagatattactccgtaatcctccaatatctgaaaaacagccttcattgagattaatgacttgattaacggtatatagggaaaagtctaatgtatcaattccacccgcatcccaaatacagctcactaatttatcttctatgctatttaaagagtaagcggcgcgtcccgtattggaattaaatccataggtattattttcaagacgtgtggtcatattttcgccatagagatattgtaacaataatatatctactagcataaaggtcataggataaaggccaccaaaatctgcatctttaatatcaggacacttatagctcataactgagtatttaattgaatctaatactttatgcttttcatttagtatgtattcccaaatatgaaatagccctagagaatgacctaattcatgtataaaagtatgatatacaaatgagccgattttatgtttattttgttggtattctttgcgtaactcattattaccccttgctattgtaatagttttatcattattaatataatatatatcatagatatctgcctcattttctatatattcatcaatattatcttgcttaattgttttataatattcgcgtgaagaaaaatcaataaatatagtacccggatcatcatgttcttcatctggttttatctcttttataggtgtaccttcctcgttaggatgactagcactgccttttcgataacctgaaatgaattttgtaccagatatattaacaaattgattataatagccaaattttaaatcagcattggtatatggtgatatttttttaaaaaatataggtacgatatctgaggtgtgttgtaatatttcttcgataactttttgttgatgagggaatattgtttcttgagtggagtaaatatagataggtatattatctagtatagtataaatatcatttgctattttttttattccttcttctaattcttttattcttttttttgaagcctcactatctttatcttcaatggtgtttaattcttgttttttttgttctctaatatttactaacctataatattcatatatatcttttagcgttttttttctcatgttttctgttaatgggtttttattttttataatttctcggtatgtgttatgatctggaaatgtataagttattgttgttatttcatttggtgatttttttggccaacctatcatagttcctgttgtgatgatccctttaggtaaatagaaattagtcgtttctttaacattttttactatagtcatataaattcctttcttatttaataataaattatttgcattaattattataaaataaacttattctataattagctaattattgtatttttgttgttttattactttttgaaaaaacacatatcagtattttttatattattagttggttgttatatttatagaaataaagtttatagaaacacactatttattagtgtgtttttagttggttatcgttattatgctggattattattaatataataattaatgataatttatagagaaatagtttaaaattttaacaaatcatatggtgaaatgaatttatatcgcaaagagttcatcgtggttaaatataccgacaatttctatatgtacaatggtattatcgtcattagaagatgttgaaacatctatgatggtcttattggctggtttgttataatttaatgaaaattcatttttacttcctgataacttatcaacttttttcatttttgttatatctatttttctataatctctagtaatcaatgttattttatccttgtttttttcaaaatcccaaatgaaactattgctttcaacgctctcatagcagaaaaaattaaaggtatcatttccttgtccacctgttatacgatgagttcccgtgcccaaatatatttcatcatcaccttctccccctagaatgatatttctacctggaagccctctatctgttgaggctacacagatccgatcattacccttaccaccatccaacatattagcaccataataatcaataagcatatcatctccatcatcaccatagagcacatcatttcccaattctccgtatataacatcgtttccagagccaccatagaataaatcattgccatcaccgccatagaataaatcattgccatcaccaccgattaggttattatcaaaaggatttcctatgagagtgtcatcacctttaccaccaatcgcattttcaataatcgttttataggcaatagagatattactccgtaatcctccaatatctgaaaaacagccttcattgagattaatgacttgattaacggtatatagggaaaagtctaatgtatcaattccacctgcatcccaaatacagctcactaatttatcttctatgctatttaaagagtaagcggcgcgtcccgtattggaatgaaaaccataggtattattttcaagacgtgtggtcatatttgggccatagagatattgtaataataatatatctactagcataaaggtcataggataaaggccagcaaaatctgcatctttaatatcagcaaattgataggccataactgaatatttatatgttaaaattacatcattttttatattttttaaatatacatttatgtgcattagcccgagtgcatgacctaattcatgtataaaacaaagatattcatatgatcctagtttgtgtttacttttcattgtttcgttgagtaacacatccgtactttttattatagcaacttgattattatcatggtaattatataaatcaccgggattggcctcattttctatatatttatcaatattatccccgttttcccatttataaaattcatgtgtagctaaattaataaatatggttccagggatatcataatcttcatttggcccgatctcttttataggtgtaccgttatagttaggatattgagcaaagcctccatttcctctcgtcataaaaaaagtagttgaatctttgtaaaaatgattgaaatagccaaactttaaattggcatttttttgtataggtactctagtaaaagtaaggtctgcgaaatctgaagccaattgtaaaatttctgtgataacttcttgttgatgaggaaatatcgtcattggtgtagccaaaaaatataaaggtatgttctttattatctggccacttctctcactctttgattttatatcttgatttatttcctcaattcttttttggaaaccctcactatctttatcttcaatagcttttagttcttttttcattttttctatttcatagtctaatttgtaatattctgctagctcctttaatgcttcttttttttgactttctgttatcggatgtttatttcttatattttctgaccgctcactgtaattaggaaatgtataggtgagatgcgttgttccatctattgaatttttaggccaacctgatatagcgcctgttgatataaccccatcaagcaaatagaagaaagttggttttttagtgttttttattaatttcatataatgtcctttttatttaaagataaattatctatgtgtttttttacaaaataaattaatgtttaatagcaggctaattattgtctatttgttttttaatttcttttttaaaaaatacctgtcagcatttctacattattagttaagattattgttatgtgtttgtattattggcaacatgatgtattattatttttaataaaaaaggtaccgcaatattattacagtgccttttctattttttctgttactgaattttttggtttaaataatctcttttttatcataattaggaggtatataagttatttgtgtgatattactatgtggttatttagctcaaccatacatatcatctataactattttaccatcagacaaatagaagtaagttgtttttttattgaattaaaactattcatactaaattctttttaccaaaagagaatgttctatatttcttacttttataatgataggagtatatatagaaataaatgttataaaaacatactatttatttcgtatatttttagttggttattattaatgtttatacgcatattgtgctgaattgttattaataattgatgattatttatagagaaataatttaaagttttacaaatcatatggtgaaatgtatttatactgcaaagagttcatcatggttaaatataccgacaatctctatatgtacaatggacttatcatcgttagaagatgttgaaacgtctatgatggttttgttggctggtttgttatgatttaatgaaaattcatttttatctcctgataatttatcaacttttttcatttttgatatatctatttttctataatccctagtgatcaacgttattttatccttgtttttttcaaaatcccaaattgaactattgctttcaacgccctcatagcagaaaaaattaaaggtatcatttccttgtccacctgttatacgatgagttcctgtgcccaaatatatttcatcatcaccttctcccccttgaatgatatttctgccagggagccctctatccattgaggctacacagatccgatcattacccttaccaccatccaacatattagcaccataataatcaataagcatatcatctccatcatcaccatagagcacatcatttcccatttctccgtatataacatcgtttccagagccaccatagaataaatcattgccatcaccgccatagaataaatcattgccatcaccaccgattaggttattatcaaaaggatttcctatgagagtatcatcacctttaccaccaatcgcattttcaataatcgttttataggcaatagagatattactccgtaatcctccaatatctgaaaaacagccttcattgagattaatgacttgattaacggtatatagggaaaagtctaatgtatcaattccacccgcatcccaaatacagctcactaatttatcttctatgctttttaaagagtaagcggcgcgtcccgtattggaattaaatccataggtattattttcaaggcgtgtggtcatatttgggccatagagatattgtaataataatatatctactagcataaaggtcataggataaagaccgccaaaatctgcatctttaatatcagcaaatcccatgcccataactgtatatttatatgtttcaattgcactattttttatatttttcaaatatgcatctatgtgctctagccctagtgcatgacctaattcatgcaaaaaaacataatatatttgtgatcctagtttgtgtttacttttcattgtttcgttgagtaacacatccgtactttttattatagcaacttgattattatcatggtaattatataaatcgccgatattggcctcattttctatatatttatcaagattatcccgtttgacccattgataaaaatcatgagaagctaaattaataaatatgctcccagagaaatcataactttcattttgcccgatctcttttataggtgtaccattatagttaggcttactagcaaagcctactgtttctctcgtcatataataaccagttgcaaactgcttgtaatagccaaactttaaattggcatttttttgtataggtactctagtaaaagtaaggtctgcgaaatctgaagccaattgtaaaatttctgtgacaacttcttgttgatgaggaaatatcgtcattgttgtaacggaaaaatataaaggtatgcctttttttatctcgtatcttctctcggtctttaattttatatcttcatttatttcctgaattctttttttgggatcctcactatctttaatggcttctagttctttttttctttcctttatttcataatctaatttgtaatactctgcgatattctttagcgtttcttttttttgactttctgttatcgggtatttctttcttatattttctgaccgatcactgtaattaggaaatgtataggtgagatgtgttgttccatctgttgaatttttaggccagccagatataacccctgttgatataatcccttcagataaatagaaaacagtcggttttttagtgttttttattaattccatataatatcctttattatttaaaaataaactatttgtgtgcttattataaatagtttgcatttttattatttaataatttgctaattattgtgtttttaattttttatttctttttgaaaaaacacatgtcagtattttgttacattattatgttgttatattattagttgattgtattgttaataagataatatgtttcctgttaaatagaaaaggcactgcaatatgattacagtgccttttctatttattattattatgatagttccctggtgaggctatctttttgataacacctaatttaaaacctaatttatgttatcagctaggtactactgcgatttgtttgatttctatgtgaagaaggtaatattttttattatctatttcctttaaactatatatggctaaattatttgatgtctattttttatacatattctttatctttggtggagcaataataaaatgtcttatatatcaagagaaaagatagattacttgtccattggtcatcgactgcgtgcttatcgtattgcctcctcattaaaagctgaagatgtagctgaaagtttagggatctcccgtgccgctgtctatcgattagaaaagggtgaaatcgttaaaattgagacattagataatcttgctcgattacttaacacctcattaagtagcttattaggtattaatacggagtattactctagcgctaatggtttttttgaacgaatgcgccaacttgaaacacaatcttcccatatttatacccatttcgaacccttttcttatttattaacctctgattgttatgataaaacgcttgtcgaaatgttaacagaagcctctcctgaaaatgcgctaacaaagaagcaacaagaagttttatctattttaaaagagcgtaaaaagcatcaatcattacactcaccgcatatttataatttaattagtcaacagcaaatcgaaaaatttctttatgttggtatgctaggctctgttaatgtaagtaaagccattcaacaagaaagaaaacaacgcgcaaaacaagaaatcagccatttaattgaaaagttagagcaaaaaaatagtcatcttaatattgcgattatttcagatacgatgccatctttaacctttcaattgttttatcaaaacaaagcacctctctctttagcggttagtccatttcgtttaggtgaatttcctaatgtaagtacgggtattgcgacagtatcttcatcaacagaagcaatattccaatatcaatctctgtttgatacgttatgggcaaaagcaataaaaaatgatgatgccattacacgcttaaaagagattatcagtcattattgattagctagaacacctaatgtttccgctaagatatctgcagctattgcaatatcactaaactccgtaaattcatctgggtgatgactaatccccgcaacagagggggtaaaaatcatcgctgtcgggtataaagatgccatattcattgagtcatgaccggcaccacttaacatagtcatataattgatatcgtgtttttgacaaatattttcaataacttggcaaattgagtcatccagttttactggtgattcagccgaaataggttgcactattatttttacaccaaaatctttttctgctttctcaacactgtttgttaaacgctgtacaacacgttgaatactgtccgtatcaataccacgaatatccacggagaattttacttgccctggaataacgttcatcgagtttggtatgacattaagtttaccaatggtacctacggtgccgtataccgcttccgtacaggcagcatgattgatatcagtaataatacccgcactcgccactaacgcatcttgacgttgatacattggcgttgcaccagagtggtctgcatggccatttacggtgactgaaaagcgtgttggcgcagcgataccattgacaattccaattgttttttgatcgttttctagacgtttaccttgttcaatatgtaattcaacaaatgcactataacggtctgatttaagtaaacattgatctaagttttcatgctgataaccaagggattttaaaacatcaaagaaattattaccttcatcatctctattttgttcccatcgagtacggtcaatttttcctgttagcactttacttccgatacatgaaaacccaaatcggctcgattcttctgctcggaatacaattaactctagatcacgtttcagttgttgtggtttgtattgcatcaaagcataaaaaccagcaataactcctaaggcgccatcataagcgcccccttggggaacggtatcaaggtgagagcctgttcctacggcgggtaatgttctatcttgccccggtaagcgagcgtagagtgtgccaataccgtcacgatagacttcaaggcctgcctctttcattacactagcaagatagagatgggctgcttcatcttcttcgctataggcaatacgtgttatccctttgtcatggttatcttttttataaatttgcattgtttcaattaatgttttcatatcattaattgaaaagtctgttgctgtaattggttgagtcataaggttattctccggtgttttctgtaaaactgtctaaaaaatgagacaaataaaagattaaaaaagccatcttttatagatggtctgctatttttataatcgttacttattatatttacttctcagaatttatttcgtcaatggtaaataagagggattttatattctgtgagatagggcgtaattaaaaagagatatatttctgacttatttcataaatgaatcattattgtgttaaagatgttataaaagataaataaaataagatgttgtactgatattaatctttcttatttttaacataaatgaaaattattctcatggggtatattggatgatattctcatccaatatattaataattaaatctagaagaagtatttaaaacgtgctcttacaccataacgatctttatcgctattttctatttcaatatctttaccattaataacagaataatatgcacctaaatagattttaaaattatccatatctaaaatattagataattcatatgaggaatagagagtgtggatattatattttcctgggccaaatataatatcattattgttatcatcatcactattaatagtatatgacttaatattattatgggcatagatatagcctaattgtaatttacgccataaaatattagtacctgttgtaaagtcgttctcatcgttagcgtctaaataagcggtattccaatttattgtgacaccattttcaggattttgttgtagattgctccagcctaaagttaatccataaccgttgcgtttggattggtctctaaattcacccgtttttttatcatcataaccataagcattattgataatatttttttctaaggctacagcaactttaaaattattgttattccatgcaataactgggcgaaaataaataacatttttattattatatagtttatttccgtgatattccttgttagcaaaaatagacgttccatcttcaattaataaattagtttcaaaataccaattattatattggctattaaacatcatgctaccaccgctattgcttctccctcgaccttctttcatcatgtagatataaccaaaaccatcactataagtatcatttgcagtgttgcctgaatattcaacaaaagtatcttgattaagcgggaacatgtcataagcttcataacgacctaacttaaattgccaacgctcttttttaccaaaataaaaagcggcatcatcaagtgataccttaccatcaatatttgccagtggttgaacagtgaagcctgcataatttttattatctaacagacgctctccgtctaagccaattaatatacgcccattgatcccccatttatcataatcgccatagtctttttctttacctgagcgcatgttaatggaggttagctgaccttttttacttgcaatatctgtattaaattcaacatcaccatataacttgagttttccataaccggtatttgtttctatcagcgatgatggtggcgcagttatagtttcgctagtttgtgatagattgttattaagcgcctgattttgttttaacgcattttctaacttagcggcacgttgctctgctaactcagctcttttttcagcggctaacgttctctcttctagtcgagctaaacgttgttctatcgataattcatttgtattggcgtgagcaattgtcggcacggcaatgccgatacaagtcgctatcgcaaggtgtttgatgttcattgtttattccttatatcgggaataatggaggtttattatccccatgtttttttattaaaaaagtgaatgaatatctatttcagttaatgagtgaacagctaaatctgcttctggtaaggggccgtcagcagtaacgccaattgcatacatgcccgcttgtttaatcgattgtattccagcaatcgagtcttcaaatccgatacataaatgtggtggaatgtgaataaactcagccgcacgcaaaaatatttcaggatcgggcttgccttttttgagtgttttaggatcaacaattgccttaaaataatgcttaatgcctaatttttctaatatggttggggcattttctgaagctgatgcaatagcacaaggaatgtgattattgtttgcttgttctattagatctaaaacacccggtaaaatatcttttggagtaatattatttaataactcaagataatatttattttttgtttctgttaatgattttttttcatccgcagaataaacatcacttttattaccatgagataaaataagctctaatgactcaattcgacttattccttttaataaatggttaaactctttgtcaaaatcaattcctatttcattagatagttttttccacgcaatatagtggtaattggcggtatcaacaattacgccatccagatcaaaaataagacctttagtcattttgcgtgtctccatttaactttaatactaataacgtattggcggttagcttatgcgtttgatggttaattaaaatagtactgggcttatcacttaaaatactaatttctttatgactgagattaatttgatataaagtagagcgatgcaataatttaaagcttagtttttgccattgttgagggagtgaaggggtgatggtcaacatatcctgacgaatatcaacaccggcataagccatgatggtggtatttaatgttgccgccatgacaccagtatgaataccttcggcagttgttccaccttgaatatcattataatctgaataaagagcatcttgataaagttgccatgacaaatcatgtaactgtatttgttctgcgagataagcatggacaatgcgtgacagtgtggaaccatgagaggttctttctaaatagtaatgtagatttttttcagcaaagtgcttagaaactgaataaccaagagaggtaattagggaatgtacggtttgcttatctaagttattaaataacatcagggtatctgcttgtttagctactttgtaatcatcggcagatttattttctttacgcaaaattctatccatacgatagatattgccgtatttttttcgatagctttcccaatccagatcttttaattgaaaataacctgagaactgttcaataatttcatgagcatcaatattgatagcaatacgatttttaacttcttgtattttattgaaaacgctagattggctgtttagctgttgtaattttttagaaaaacgatcattgtttatgaacatctctatttgattaaacaaccaaaccaccattaaattagtgtatgcgttatcttttaagccaccttcaagtgagtctgcgtatttctcatgaaattcatccggccccataactccattaatatgaaaacgttgatcgccttcatcccactgacattggtctaaccagaacaaggtaatgtcattgagtagttcaagtccatactgttccataaattggtgatcatgagtatttagccaatatagccacacattataggcaatcgctaatgagacatgacgttgacgacaactgtggtcggcatcccattgccctgataaggggtttaaatgcagtgtctgggtttgctcactaccatcatgccctgattgccaagggaacatagcaccttgaaatccttctgctcgtgccgcaagacgcgcagcaggtagcctgtggtaacgatatagtaatagttggcgtgcggtttcagggaagtgcataatataaaatggcagaataaagatctcatcccagaaaatatggcctcgataggcttccccgtgtaaccctcgggcggtgactgaaacatctaattgatgttgctgattgctaaatggtgatgcggatgacagtaaatggaaggtatgtaagcgtagtaatttttgggtcatcagatcgccagaaatcgagatatcggcactatcccataacgtttgccacgctttttggctatttatcaattggctgtgtaaaggttgttgttcccaattaaccacatcttgccatgagtctgggtaagccgtagaggttgttacagcaacacatttttcaagttgataggtggtattttgttgagcgttgaaggtgatggtttgttcaacaagcgtatctgaaacatgacaaacaatatcttcatttgcaaagaaatcaccacttattgttgacgataatccgatccctatttttgactgatctgtttgagctaatataaatgcgtgttgcttattcgctccagtttgtagcacatgataatgatggggattaaggctacggtagcgttgtacaccgtaattataagtatttccttctaggcgagttataaccgttatctcacctgagaaatttaatggtttaaaggtatataaaatggcgtaatgtgacatatcagccatattggcaaattttgtacaatgaatatcaagttgctgtccttcaggggtttctacacgccattggctagtgaatacacccgtttttaaatctaattgacgtgttaaatggtgtgttatcagttgctttggatgaagatattctcccttaccaattttaagagaaataaattgtccattaggtgcattaacaaaatcttcattaatcacctgatggttttctatttgtgaacttgcttgattatataggccagcaatataggtagcagggtagtgctcatcacttatagtcatttcgggcaaagttcctcttaacccaatataaccattggccgtagttaagagagactcttggcaatattcatcttttcctgtttctaagcctgaatattcaattgaccaagcaaagttattggcaactgtaaccattttttcttctaaatcatgatgatgttcaagctgcgctttattgatataaataaaaggtttattaaatatttcagtaaagaaatttgataaatttattactttattatcaatggttttaataatagcgctatccgatttattacttgtcgaatatatcaaaccaccttgagcagagttaaatttatgattaatagctttagccatatttagccaatcaaggtaatggctatttgtggtattaaatgaataatggcttttttctgaaagatatttaatggtgatatcagtatcagaaagaataatagagatataattcatgtttaacctttagtttgagattaaattaatcgacttgcaaggtgcctgctttttctttatagcgatagaccagaatggttaatccaatagggacgacaatagccacaatcattgctaataaataaactaaccaataagtaggttggatagataaaataccgggtaatccgccgacaccaataccattagatagcacattatttaatccacaaatcaaacccgctagcgcagcgccaatcatggcgcacagcataggaaagccatattttaagttgacgccatacatggctggctctgtcacacctaaataagcagagatagctgccggaatagtaatttcttgttcatttaatttgcgactaacgataataatgcctacaacggcagatgcttgagcaatattagacagagcgataatcggccaaataggtgtaccgccataactttgagtcatttgtaaatctatcgctaacgttgtgtgatgtaagccggtgatcaccatgggggaatagaaaaaggcaaaaatagttgaaccaataggggcaaaatcacctaacattaaaaacttgatcagttgggcgagaccatcacctatgcttctaccgatagggcctaaaataacatgggcaacaaaaacggcgacaataagagttacaatcggcacaataactaattttaggtaatcagggataaaacgacgtaatttagtctcaaaccatcccagaaatagtcccgctaaaatcgaagggatcacttgggcttgataacctactttctcaatagtaaataaaccaaaattccaaacctcaggaagttgtgaacctaaattgtaagcattcattagctgtggagaaactaaggttatacctagtacgatacctagtgcaggtgtaccacccatcttttttacacttgaccagcaaatactcacaggtagaaaatggaagatggcttcacaaggtaaccagagaaaatcatatattggtgttaaccaaggataaaaataagtgaggggtttattatctgatataggcatttcgccaataacatttcttaatcctaacaataaaccgccgcaaattaagataggtaataatggaacaaaaatttcggctaaattggcaatcagcttttgccaggatcccatattctttttcgcatcagattttatatcatctttagatttagcttttaatgaaagcttatcaattaataatttatagtagatatcaacatccataccaacaataacttgaaattgacccgcattattaaaacagcctttaacaaaagatatttttttaattttatctatatcagcaagattgggatcattcagaacaaaacgtaatctggttagacagtgtgaaacgctaataacattatctgaacctccaacaagagtaattaactcttcaatggcttggttgtcttgaggtatcgacatattaatattctcataatagtagggttatttttaatatatcgagatctttctttttatccaatgggaacgttcccataacaagataaagatcacagttaatgatcattaatttatttgatcatgggtttaagtcatgacttgatataatgattttttgtgcaggaatatttttttctagcatttgtatcaatatgttagcagcttcttgtccactttctctaaaacctaatcgatagaatttagtttgaggaaataaaaaggtgagtagatcattacgaccgatgcaggccacctcaatatgatctattttctgttcggctaaatatttttgtacaccaaaggccagagaatcggtcgcacataaaatagcttgaggcttgcttgctaatgcttgtttggcaagtaaatagccactttgataattaagttcaccaagttgagcttgagatattaattgatgttgctggcaatattgaagataagtttgataacgtaataaacccgttgtttcatcattaatttggatcccgataaaacttatatgttgataatgtttgtctcgatggaaataatgcattaaagcgttaacagctcgttcatcgtcatgacaaatggaaacaaaaccttctagtggtcttgctataacaaccattttttgtttccaacttgctaagttagccgcattgatccctgaaaatgcaaataatattacgccatcgattttctggtgggcgagcatttttaagttttcttctactttggcttggctaaattggctttctaaaataatagggtcaatgttgttttgataaaggatcggtaatatggcactaactgcttgattttccgcataagaatcaaggcgagtgacgataataccaaaagaacgattagagtacccccgcattgctcgtgcagattttgacggtgtgaatttatatttctcaataattgagttaacttttttccttgtttcttcattaaccataggatcttgattaagtactcttgaaacagtcgatttgcccacaccacaaagtttggctatatcattgattgttaacttttttttattagtatctgtcatgagcgtttttctgtatttatctgctgtgtgataaagttattgtagttttagcaggttgttttccacaagtgattcttttactgtttgatttagtctaaaaattgtacgcagatactaccacaatcgtaaaaaagagaattttatatttgtcttttttgtatactaataacaataaaatgagtatacattgttagatgagaataaataaccaccatcgttttgactaaaaacagaaagacttctttgccaaccttcttttacatataaattgggaattattttattgataatttcactgttattatcgttaataaggatctgtgtagatgctagcttgtagctagttttcagtttggttatatcaaaaaaagattttctatacactgggatcaaatcgccgttataatcaataacacctcgaatacttgcccatccttgctcctcccctaaagtaaacattaattctaaattagctttagtatcctctttatcataaataattaactttgcttcacaatttattacattttctttttcttgattgaagtaaaaactaaaataaatcattaaacttaaaatgataactaatacactaatagcactatattttttcattttttattatccaatacataaatagacacacattgattatgcaagaaattaataggactaaacttttttttacataatattaatgatgttcgtgaataagaatcactttcagttatatagatgaaattataatctgaataactagaaatataattatcaattaaattttctttttcctcatttaatatttctttattacaaaataaattatattttttatatgttccgcagttactatagttatataatttatgctttctactatctaggtaattaaaagtaaaaataacaacaaaaaataagactatcaatgtaaatataataataaataatttcttttttgataaagatatgcttgttttttttattgatgataaagagtgatctttattattaatattcgtatttatatcttcttctatttctttttttatgtgaggaatatcactaattttattttcattgattaattttatatcttgaatattattgtcagatagtttttcaatactaatattgtgattaatgatatacccttttcgaggaacggtgatgacaatctcatcatcgatatctagctcattaaatgcttttcttaataaaagaatattttgatagaaagcgctattagttataaatttttctttatctccccagccaattctaaataattctcgttgcgtaactaattcattaacggtaataagatgtattagcattttagatgaaggtgctaaaattttcttttctttattaagtttttttgaaaataataaatttttatcgctataaaatataatgtcatcattaattagatacatagtgccgccaatacgtcatttggatatttattcttcttaatgctagaaaaggagtattttttatatataaagctaaaaaattattttttcaagttaaaaaaactaaaaaatttgtttatcgcattttaatacatttaaataacaattagaaacttactggtaacaaataaagcaagatatctatttatttattcgtatagattaactatgtgacttttattatttaatattataagtctctataatctttaggaattaccattatttaaatttatttataatgggggtgttactctgggaattagtggaaagcttttataaataaattggtattggaattaaatttatttaaaaatgagtaaaatcacttctaaaattaaagttaaataaatcaattaagttgattttggtttttgtctaacgtgttgatattaatgttattttttgtgaattttgggagttttgtagtttttttgctaacacgcattgtaataactcatgtagcatttattgcatcaacaacattgcgaaacaaagttaaaagttagttttaataaaatacaatcataaagcagtaactggcatgctcgtattttagcatgatatatcccatttttataaagctaatagaaaatagattatggaaagagaaaaatacgaaattgataaaacttacgatactaaagctattcatcaatacttagggaaagagatccgttcaaaaagaaaagcgataggactaacaggtgaagatttagctaaaaagttaaatgtcagtcaacagcaggtatctagatatgaaacagcagagtcaaaaataagctttgaaaagctattgttaatatctgatgttctagatcttaatattcaatatctattaaaagttatcattagtgataaatttaaaattatttctgatgattagcttttaattaaattctatggacaagattccaatatggatatttatatttttaatagggatgcgtgaataaggatattcttttatgagatagcctatctcaatgtcggtaaatactaaaatagtcaaatataaaggaaatgatgtatgaaatttaataaaatagcattaacagttctattagctacttcagctatttctttaaatgctatggctgataatgctaatacaggtgttatcacatttacgggttctgttgtaaatacgccttgtaatattgctcaatcttcactgaaacaaacagttgagtttggccaactttctcgtaaagccttagaaagtggtaaaatggttgaggctgattttgatattgaatttacaggttgtgattttactaattttggtatagatgccactagtggtaagcccgttccggttaaatcaatggaacttgtctttactggacaaaattatgctgatacagcaaatacattattggctacttctgctggtaatacaaataacttgggaattttaattgatggttttgagtttggaaaagcaaaagatgttttaccaagtattacaaatctaaagggtgataatgtattaacctttaaagctcttgctaaagctgttgatgcaagtaaagatgtttctgaaggtaaatttagtgcaatttctaatttccgtataacttatcagtaatatgaattaaattgactgttagtaaatataaatgctggcagtcaattttatctcttgaataagaattttttaatttattatttttcatattaatttcgttggttttattttatatatcaatgggtttttattaacttagaaataaaccagctaaagctgaagattctatttatataatggagaagaaagtggctatttatcgacgtataggattgcaagtaattagcagtcttttgtcacttatttctagtacagcattggctttcgatcctaaagttattgagcatgaaggaagtacttatctagtgggtagtgttatctcaactccttgttctattgtaatgtcaaatcgttatcaaacggttgatttttcttctttaactttagctatgttatcaagcaaagaaaaacgcgaacagcagactttaccatttgaaatagaacttcgtgactgtggcagcatttacacgtcaattgacagcaaaacatggatgatacgttttgatggacagagcgtaagtaatatcaatgcatttatcttgcaaggcacatctaaaggtttaggggtttctgttctagataataataaaaatgcattaataccaggagaaacatatcctttattcgatagcgtattacgacaagataaatcgggacaaatcctctatctgcgttacttccttaggctagaactcaccggagaacctttacgagctggagattaccaaggactggttcgtttttttatccattatcaataaaggtagatgcattttcttaggctctaatgaataaagtattttattacctctaggatggggatggtgaatagtatgatatttgaactcaatcagttaaggcaagtcgtattattgacaatgagtattagtgtgttttctgcttatgctacagaattcaatatcgatgtgttagatgcagaagatatacaaaatatcgatatgagccaattttccattgctggctatgttccccctggtgattatgtattaacagtttttgttaatggacaacgtttaggcgcacctcgcgatatcacggttttagagcaaaaaacgcaaacacaagctatctgtatacctgctgacttacttgattctattggtttaaaagagtctgtaaaaccaaaagtgactgtataccctaatagtcaatgccttgatctttctgttttgaaaggaatgcaaacagttattgatctcccaacactatcactcaaaataacgatcccccaattatggatggaatatagagatccttattggactcctcctgcattatgggaagaaggaattaatggtgctttccttgattacagcgctaatgtttcaatcaccgaagaaaaagagggggataaacgtacttatttgtccactaatggtactgcgggtattaatttaggtgtttggcgctttcgtggtgattatagtgccatctatcaaaaaaagcggggtggcagacaatcacaagaaatacacgattttgattttagccgtctttatggttttacctccttgaaaaaattggcttcaattttaactattggagaaaattatttttactcagatgtttttgaatcatggcaatacagcggtatttcattagaaagtgatgatcgcatgctacctcccaaattagtggggtatgcaccagagatcacaggtgtagcagataccaatgcaacagtgattgttcgtagccaaaatcgagtgctccttgaaacaacagtaccccctggaccatttcgtattcaaactttagatagtggtgttcgagggatactcgatatcacaatccgtgaagaaaatggagaagagaaaaaatttagtatcagtactgcctcattaccttatttaactcgccctggccgtctgatctataaattagtgatgggtaaaactcgttatgatggacatcatttaacaggtaaacccgtattcagtggtgaattctcctatggtctatctaatgcttggtcgttatatgggggaacacaatttaacagcgattatcaggcaacggcgattggtataggacgggatctattttcttttggggcattatcacttgatattactcagtcttttgcacgttttactgataaaaaaataaaagggcgttcttatcgtcttaattatgcaaaatcttttgatgcactacgcacggatattacttttgctgggtatcgatttgctgctagagattatcgcacattaactcagtttatggatcaacgtcgtactggttatgatattcgctctccaaaagagaactatcaaatttatataaacaagtattttgataattttaatatatcactaaattatcaatatagtacctattggcaagataaacctcaaacacaatatggtttatacgcaagtactaatatcagtattccaatgttatctcagcaaaatgcgaatatatctttatcagcaaccagaactgaacgagatagtggttatcaagatgatgctattaatctgtatttaacaataccattatataaaggccatagcatttcattttctgaatcatattctcgtattggtaaaagtaatcaatatagccatagagcaagttatagtggttatagtgatcgcgataattatagtctgaatgtgggctatagtcatggagaagaaattgatagccaatcaagtatcagtggttattattctcgcgacttttctcaagctaacttatctgctaacgcaagttatgtaccacaacaatatcgtagtgttggtgcatcaattaacagtggtattacagctacaactcaaggtattgcgttgcatcgttcagctaatggtgatactcgtttaatgattgaaacaccaggggttggtgatgtacctctagatagtggcgttatcaaaactaatcactttggacttgcagttattcctaatgttaatagttatcgtaaatctacggtttctattaataccagtcagctacctgaaaatatagaaacgctagaatcaacaactgatattaccttgactaaaggggcgatagggtatcgcagtttatcagtaatgaaaggggaaaagttgtttgccattatatccctaaatgatggtaagaaaccgccttttggggcaagtgtacgtaatgcggataatcgtgagttgggtattgttggtgaagatggtgtgacatggctagtaggcatttcatcaaaagaaaaactatctgtttattgggcagggaaaaaacaatgtgagttgtcacttcctgaagatttagcatcgccaactagcatgttattgctaccttgctcttcacctactatatcaaaaattacagaaaattaattattaattaaatgttttatattgtgaggttagttatgtttaattttagtcgtgggttatattgtattcttgttgggtattccatatttatttcgatggcggcacatagtgctgtgacattagatagaacgcgtattattttccctggaacggaaaagtcaattaatattactatttctaatgataatcctgaagaagcttatctcgcacaaagttggatagaagatttgcaggggaataaattaactaaaggtgctattttagcaacgcctccattacagagaatcgagccaaatagttatagtttagttaggttaagtacaacaccagaattacataaattaccacaagatagagagtcggtattttattttaatttacgtgaagtaccaccgaaatcaacagatggcaatacattacaaattgctttgcaatctcgtgtaaaactattttatcgtccaaatagtattttatctgaagcagaaactaaatggacacataaagtgacattaaccaaaacggctcaaggctaccgagttaataatataacgccttttaatttaacaataattggatttggaaatagtaaagcagccgctgaaaaaaatccttttgatgttgtcatggtgccacctaaatcgactcatgatattgcgtcttctatattatctacaccttatcttacttatattaatgattatggtggtaaaccatcgttggtatttcgttgccaaggtgatacctgtgtggtaactggtgaacaataattcttaacaatattggaatataggaaaagtaatgagtaaatatcacgtttttaaaatagccaaatggttcaaagtgcttttactcattgttggctgtgcattcagtcaatttattatagccgaaagttctatcgtgagtactacgacaaaacaatcagtttatgagccattacatcaaggagtagttcaagtgagagccactctgtttaatgcgccttgtaatttatcttttgataataatttaagtttgattggatgtggagctggaaaagattatcgcaccataaacttatttgatgtaacagcaaatactcctgcaagtattcgttattatgatatacaacgaaggctattttctgaagattattcactttcattacacaatggcaataatccaatatatttacccaccttaatgaaagatcaacatatattacgtttagaggtaagttatgaataagatggtgaaatttctagggcttatttctttaacaatatgtaattggcagtctcaagcattagcggccaataatttagatgttgaatttagcggtgagttaatcagtgttgcatgccaagtcgcttcagaatcaataaataaaaaagttactttacacaatctacgttggcaatttattaatgaaaatgaaattagtaaagtgactcatttcacgattgcgattgataagtgtagtgaaactgacttacagaaaagtattaaattaacctggaaaagtaacgaattagttgatatcgatggtaatcattttcttattactaaaggggatagtggagcactattaggaattattgataataatggaaggtctgttatatggaataaaccgatgacaattggagatgtaagtgttgttgatggttcacaacaatttgagtttggtgtttttgtccgtaagccagcaataggagaaattaagattggtgaattttccagtatcgtaacttttaatgtggagtatgaatagtgctaatatggctaaataaaatgaaaaatttattgggtgtagctttattatttatttctctagtatgtaatgctgatatttttattaatatatctgcaacaatggttgaacctgtttgtaatatacgtagtgaaaatggtagtgctccattaaaaattggttttgatacattgacgatatcttcactgactaaatctcctgtggtaaaagatttttcactttatatatcagactgtaattttaataatacattagccattgttttaaacccaaaaggaggaagtacgcttttatataaaggaaaaaatatattagcaacaagtactgatgggttaggtatagatattaatgaagtgactggtggaactattcgttcactggaaacaagtaaaaagcataaaatcaatccagaacgaattaattcaactctttatcgtgttgacttacaagctcagttagtaaatacagtgcctattaatcaattaaaactagggaagttcaattcaatagttactatttcagtgacttataactaatggatattttttatgttgaaactaatacataaattttcctcgtggaaaaaagaaatagcattaaataatgtaataatacctttattaaatgacctaatttatttcttaatattattaagtgttttttttattaattttatatttacatctattgctattgcagattatgcgccaagaattcaagatataaacactggctatatgattaaattggcaagtaacagtcctattgcattaaatccagtgaaaggtacagatggtaaaaactattataaagttggtaatacgattgtgatcaataatacaccatctagtgtaagtgtatcggggattgttcagtgcatcgggcttacttggggacatgcttcaacaaatatttcttggaataatgcatatcatcgcttgtttacatatgtacctatggctggtaccaatatagaaggccatatggcatatcgtattaatagtaatttggtaatgaccattgatactcaaatgttgaattgggtaaatataagaggatctgtttgtgaacaggctacaccaacattaactgctcatgccagtgaatttactgtacaatttccaatcagtgtgacattttatataaatgatatggttattgattctcagctacctatacctgaaatggatctaggaggttatgttcgtgcatttacacgatcaggaacgagtcctcctcaaaattcttgggcattgaatgatgtcactgttcctatgcgattagcagcatcacaattaaacgtaacttcttcttgtaaaacagtaacaagtacaggacaagtaagtactttaaatttaaagcatgggcaactcaatacattaaattatgacagcttagttacagaaagtgtaacttataattgtgttttttcaaaagcaacaaaagtgagattacgtctcgattatataactgataacgatcctcaaaaaagattaccgatggtgagtacccaaaacagcaataataaaatttatagtgaattgaccatgacagatgaaataaccgggcaaaaaggtaaagattttaaaattgacattaatgatttgagaacaattaagataaccagccatcttcaaggaacaaatgcgatagctggagattataaaggttcagcttggctaatcgctacgtttgattgatatatttatctaaataaggcctatttattattagataagtagagccttttttacattttttagaaattaacttaataataaatctttattgataagttgtttcttttttttaaaaaaattagttagtaaaagtatttttattaaatagaatgggatattctgacgcttgataatgaataccaaacacctgcgccataaaaatagagataaatatatctagtggctgattagagcaggttagttttgcttgcattattgctccttgccaacccatccagaaaaaaatagccatttgtctacaatcaatgtttttagatataaacttatatttttgtgcttctagaagataattttctacctttttctgccatccagaaatcacattattcagtattttataatagttaatgggtaaattaacaatatcttgtatgagattacttactaagcatcctcgttgccaatgatacttttccatttctgattttatcatgtgacaaaatgctaatagtcttttggggaaaggtaatgcagtataagacaaatagttatctagttgcttagaaataaagttgtcataatgttggatgacgactaaaccaaatttttctttactaccaaagtaataataaaatgatcctttcgggataccaactttttctaatatcttacaaatgtctgaactgatatagcctttttcagcaaacatttctataccactttgaataactatattttttacatctgtattaggactatgatttttggggggacgtcctcgtttcagtttggtgatttctgatatcatcattttgctatctccacgacaggggagcatacaggtagcttattgagtacctgtcaatgctgattattttgttgtgagaaaagtccctcccgctgaaattttatgcgggaggaatataacgaatagcgtgtgttattttgtcattaggtcttggttttgtttcatttcaaatcgtggggagacaaaaccatatagtgtccatcccaagaatgtggctaatgccccccacattacagcgtcttcaccagatgaatacagagcatagaaactataaatggccccaatgaatgcgatgatattactggttctcgctttatgaggttccactttggcgactttttgtaaaataatcattgccgccatagaaaggatgtaaggaataatattagtcacaactgctagattgacgagtacattaaactgtttatttaatgatgggctgatggtcatcagtgacagtgcagattgaataacaacaataactaacattccttttactggggcgtcagctttgctaactgcagaaaatatttttggaaaataaccagaatccgatgacgccttaaatacttgtgcgatggtgaactgccagccaagtaaagatccacaacaagacataatcattagcgccataatgattttcccaacacctggggtaaacatttgggagaaggctaagccaaatggcgcggtagagtttgccagatccatatttggcacaatacctgcgataacatttgttgatacgatataaataacggctgcacctaatgtgccacctaatacagcaataggaacattcttttcaggattttcaactgcttcactattggcacaagctgattccatacctaaaaatgcccataaggtcatggcaatagaagagcctacggcttcaaagaatggaaaattatgtggattccaagagttaatgtattgttcaggattgaaccaccaccagccaataattgaaatacccacaacagggatgatcaccccccagacagtgatgctgcttatttgtccggtgatccgcgcaccaccaaaatttgctattgtgcagatccacaatacaacaatcgttgcaatacaaatacctaacggagtcattgtcgcatccatcagttcggcaccataacccacagcagaaattgcgatagcgacattggcaattaacagggaaataccataggtataattggccataaaattccccgatttgccaaaggcatactcggcataccctcccattcctccgctacgacggctaaacataccgcatttagcaaatgcataggccagagccatagagccgactgcagtgacaatccaagataaaatagaaatggttcctacttcggctagtttggtcggtagcataataataccggaacccatcatattcaccgcagttaatatagtgagttgcaatacactcattttattttttgaagtactcatcgttttactctccggctgacggagcatgcttattcacactccgtcacgcataaattaattaactcagtgcttaattacatagccatatgcccgcagacgaccgtcctcatcattgcggatatatacaccttgtaattccggtgagaatcccgggaatagattaattccttcttctagcgctagaaaatattgctgtacagagccaccccaaatttcccctggcactacacacagtactcctggtggataaggtagagcaccttcggcggcgatacggccttcaattttttccacggcaactaactccacctcgccacgcacaaaagcgatattggcttcttgaggtaacatactgacttgtgggaaatgtgatttacggaacatctctttttgcagttgttttacattaaatttcacatacatatcatgcatttcttggcacaattgacggatggtgtatccttgataacgtgtttggttggcatgatatactgatggaagtacctctttcagtggggcatcttgttccagtaattgttcaaagcgagcaatttgtgcgaccagatgctgcattttcgccatgctttctgcaggcgttagcaggaataatatggagttaagatcgcatttttcaggaataatgttattttcacgtagatagttcgccaaaatggtggcaggaacaccaaatgattcatattttcctgttttggcattaatacctggggtggttagtagtaatttacatggatcaacaaagtattgattttcttcatatccctcaaatgagtgccagcgctctcccggaacaaaattaaagaatcggagatcattggcaatttcatcagtatcaaaatcttcccatgcacggccatcgatagtttctggaataaacgggcgaatatgtttacaggattgcaggagtaatttacgggtttcaatccctgtttttacgcaattcatccataaacgtttacctgactcaccttcatgcattttggcattcacatccaaagctgcaaataatgggtagaatggactagttgaggcatgcatcataaaggcgttattgagacgtttatgatttacatagcgtttttgacctttaatatggcgatcttttttgtggatctgtgaggtttgagagaatcccgcttgttgtttatgtacagattgtgtaactaagatccccggatcgttttcattcagttcaagtagaagtggagaacaatctttcatcattggaataaactgttcatagcccacccacgcggagtcaaataaaatgtagtcacataaatgtccgattttatcgactacctgacgtgcgttatatattgttccgtcataggtacctaattggataacggctaggcggaaagggcgcttttcatttgcacgtgtaggggcgacttctttgatgagttcacgaagatatttttcttcaaaacagtgagcatcaatcccaccgataaacccaaatgggttacgtgcagcttcaagataaacaggcgttgctcctgcttgaattaatgctccgtgatggtttgatttatgattattacgatcaaataatactaggtcatctggtgccaataaggcattaagaacgactttattggaggaagatgtaccattaagtacgaaataagttttatcggcattaaagacttttgctgcatgttgttgtgcggcacatggggcaccttcgtggatcagcagatcacccatagaaacatcggcattacataaatcagagcggaataagttttcaccaaaatactcgacaaattggttacctagaggatgacggcggaaaaattcacctccttgatgcccaggacaatcaaaagctgaatttccttgttcaacgtatttttttaagctgccgaaaaaaggaggtaatagactctcttcatattttaacgctgcagtttctagttgtttattatataactcactattttttttatttaaatcaattacaccagttaatcgattaataatattagcagggataacttcatctttattaataatggcaaaaataggctgttcaaagctattttgttcaattaaattaagctttccattctgaatgtcattaagtgaaataacaatcacggcaacatcagaaaaatcagtatgtagaatatcgacacattcacggtgggttgaaatatagtcagacatatcgtagctgaccgctattttataacttttcatttttaatacctttttttggtaaaaaattctcgctgaaatattaagtaaaaatatttcagttttttatttttataaatgcgagttttttccctcgatagagtgtcgagttataaaaatcacgtttatatttatgtcatcacgtataaaaataatgtatagaatgatggtttttataattttagtaatatgtttttagccaaattaccaataataagaactaattaactgcacattactatgcataaaaaccaggaatatgaatgatcaataagaatccattatagtcacataaaatgtgatttataatggtaaagaggttgactatccatacgctggtaatatgcaaaccacgtgatggatgccaatagagagattatctttgagcgttgaaaagattaaaatcaaaacatgaacgatgtgaaaacatcattatatgtgtaatacgtcttatatgtggccaaaatcgattattattttccattttcgcatccgttaattattaagacctatataacaactataaattaatataattaaatacccgaattatactgtgatatagatcaaaatatatcattttaagaatagttttgtctttaattaatatgttgcttgttaattatttgttgttttgtttttaataagagaacttataattaatatagtcgctaagtctatattataaatagcaatataataaatataaaatattttcattatgaatgtatagggttggttgtttgtataaatataataaatattttttattttgattataaatatagtgtatgttccctttattaaattattcgtgtagtcataaaacactttaagacgtttttatcaggtgcgtcgtaaaacccatctttcaggggcgcgatataaggtgtggttttccggctaactcagtttcttttgtcatagaccaaagtacaatgatatccatataacaactttaagccttcaaattccaattaatatcaaatggtcagtaggagggtaatatgcggtgcttcgcaggagcttgtcactttattttcaattgtgcgttagcgctttagaatgaggttctgatattgagacttgagaagacaagcagtacagttagtactgcttgtagtcatagtagaaaagaagtgacctttattactccaaaaggaaaaaggattagagcatcacagaatgaagtttttgatactttattgaaatcaataaaataaatatttattggatgcagaaagagagagtttaggctctcttctgtatatttatggcgtaactagtctgttttttattacaaaattagtttctgattacttactcttttaatagggctagctattttgtaatagtagagagtattaagaagtatttataaagggtgtgataaatagtcgtaacgaaatttgaaaggaagaatgctttgttaatttttcacataagattaaaaagtaaaaggagaacctaagttctccttttgatatttctctacgacaacaatatgtgttgaaggattagccgctgcctaatcgactgatacttgctctttacaagctgacctcagtcaggtgcttacgcgggtctcatctggattttaagagcggggagactcaagcacactctataacgcctttatacccgtttatcttgatattatcaagtttttttgttttgtttttttattgaactgaataggcagatagcatgtataatggcatttggatactgttgtgcaatgatatccctagctgtagttaatgttgttcctgtagccataagatcatcgacaagtaatattctgattttttcagtattggatgatgcttgtgtgtttaaaacaaatggtggaaatatattcctaaattcagtagggatactttttagtgaaaaccctcctttaagtccaacttcttttgcttgtaatttaattttgaaactaagacttttagcctcttcaatattaatatctgctttatcgagaagttgaaaagcattatcgactgttatttttcttaaaatatcagttaaatatgtggcattaaatttttttgctaaacgttttgcgataatagggctaatattatgggctgaaggcattgatattattagttgataccctttaggttctaattccataagtttattgcaaatgattttgaagctatcattgagtttttttatgctagaaatatttgtatataaatcatccttttttttcaaagcataaattaaaggacaattatcccccagttgacgttgttttctattacgtcttcttttacctgaaaggaattgtcttttaaaaatagcataaacttttaagccatctgtataatcaatagttggattcccttcagactgagttattagccagtcggggcaattatgatcaacaataacacattgctcttgaattattaatcccataaatacatatgctagtccgagaagagaaggaaagtataacagagagaaaatagcagagctatattaaaataaggcaatgtattatttagaatatataattacattaataatttaatttattaagttatttaatataataattgttaatcgaagtccagactttcatagtgtgtcttttttatcataatatttcggacacttaaaaataatatgaaaagagtgtctatttattcgatattttcaattaatagacacttgttgtctgataatgacttaggagacatattttgcgcctatttggttatgcaagggtatctactagccagcaatctctcgatactcaaaagaaagcattgattgatgccggagtggcaaagcatcgcttatttagcgataaaggatcaggaagtcacattaatcgtgatggattgcagttactcaaaattaaagttgaatgcggtgatattattcttgtgaaaaaactcgaccgtctcggacgagatactgcggatatgattcagttgataaaagaattcgattcaatgggtgtagctgttcgatttttggatgatggtataagtacagaaggaacaatgggaaaaatggtggtcaccattttatccgcggtggcagaagcagaaagacaaagaattttggaacgaacaatgagggcaggcaagaagctttgctcaaaggggtaaaatttggacgcaagcgttcagtggatcgcgaaagaattattgagctaaaacgaagtgggtggggaggaaccgcaatagccaaagaaatgaaagtagctcgttctacggtttataaaatcttgaatgaagaaatataaatgtagtgtatgagcagtgacatagcagtaatgtaaaagcaaactaatagactgcaatgtgccagtagaaaacgttgctaattacgttgtgtattaaaaaatgagaaaaacgatcatgcttagtacaaaaagcacgaaagaccaaaataaaggaatatgtatgaagtgatttagtatattggataatattttgggtgtggttgctttaggtgaaaaataaaaaatcgagaaaatttagctagtgccaaagtaatttggacaccgccagtcatcagacccactaccacacttatcatccctgcccatacggtttcaataaaacaagatgcatatagtactatatggcggaataatttactcataagcttttccttgctgacgtaatcgttaagtaacacgttgaagtaacgggtaaacacaattattaggagagctgtgatgaggaatgtaggcataggaattgaatctatggatgcactagctaaattcactcataatgaactgtacagcattggatgggagttgtaaataagtgtacctcaagagtcaatttttagattttataaccgatagaataacaaattttaggtatatactaatgactgttatgaggtgatattttaacttcccaagcatacaggaagagcttagaagagtttatattcgataaattaataaccacgctgaatcaaaaaatctaaaagttcatatagaggaaatttgttttgttatacaaagaaatctctaaaaagaaaaacaaaaaagttaacgatgatgctatcaaaacttaaagaaagaattatttcagcgttttcataagactaagaaaaaagcagagcgagatagtcagtttgtaatgaaataactttaatttacaaaaaaaaggttctttggtaaatagaaccttttaggttggtaataataagttattttttattcattattactttaaatatataaaaatatttttctactaactaatttttcaaaatattattgatagcctttattgttacaataagttctaaatgcagagccgtttattaatccaaggtataatatttgttcccaatgatttgccccaaaaataagtctactcttattaactgcaactagagcagagtttagtgcagaagaaagaagtatatcaaagctctctatgtttgaaattatgatattttcaaattgtgctattttttcatttgattttgatttaaatctatttaacaaatcaagattgatataatgtctttcaattagcatgaaaatatcttcattaatgttattttcatttcttaattcaaagttaacattgaaagtattaccaattaaattaatgtttgcaaaaagatattgtaaattgggtaggtcatgtgaatataagtttataaactcaaagttattattattatctaaccatttatttgattttttgctgttgcattgactacaagctggaaataaatttttaggatgtactgcatattcaggataattttctttaggaataatatgatctaatgtatttacgctatttaaagtgcaatactgacaagtatccatatctctaccatttggtaattttaataattgattcttaaaatttgcaaatggttttgaactataattatatagtttgagtaaatcttttttttctaaatctgaaaaaataagcgattgttgaataagatttaaagtattattatcaaaagatgtatcataattttgataataggtatttaatgaattaaataaattagatattctatctttataatctcctctattttttgagttaataattgaacgtaaaaaagagatactagaatcagaatatggagttaagttaatcattatttttgatctccatgttttgtaataaaatggaaagatttaaactaagaggaactccatcagattgaatggattttctaatatcatcaatactatatccaattttaatttgatcttctattttttttctaaaatattgtggtgtatctctcgcaccgaaaatatcatcagtaatttttgacaagttttcaccaaatgtttccagcgatggatgtgttacacttaatactttattttcattttttatgacaaaaatatttttagataaaatcccttgaacaataattggagaatggggtgctattatacagtaagatttaaattgatcagcaagagagtgaatgctattaattaactgagatatggcattagggtgtaagtgtgtttctggttcatcaaaaattattaatgagtcatatcttatattagcaataatttcagtcataatatataagaaaatagcttgccctgagcttaattttttttattgatttttctaattcaatacgattaatttcatagtcaatactattggttgatgaatttgaaacggtttttatccaagtagctattaattcaggtgtgaaaaactcactattaatatgcatccaacttattaacctatctttgtatataatatttttcatggacttgaagaaacgagtttttaactcttcttctgatatataactttctttgtttttattttttttcttaatccacaatagatgtaatttattttagatgaattttcaggaatagaaaatttatcaaatatactgtatgaaacggctattatcttactaaatagtggaactttacctgagaataaatttttattatcattggcgatatcacaaggtaattttgataccaattgtgtctttcctacaccattattaccaatcaatgcatatactctattttttaaaatagacttatcattaaagttaaaagttaaaagttaaaagttaaaagttaaaagttaaaagttaaaagttaaaagttaaaagttaaaagttaactttaatttatcttcatcatcaatgtaatcaggtttaaatatatattcgaaggaataaagttgacttaaatcgtattttcttattcgatgcctagcctgtcttaataactgctcttgttcgtcatatcgaattaaactatctttaaattgagataaatgttcaaatgactcttgtattttagtaaagaaagctacatcatttagtgcttttagtattgataatgcattacctttaaatatattctcataatattcaaatttttgacctagagaacaatgtttattatctaatttaaaaaaattattttttatctcatttgttgtacttatatcttctttagagattatttttaagtctccaatgatgtattctttttgatttttataataagacaatagaaatttattatatcttccgaaatcattccagttaatttctattaatttaaaatattcgttttctttatttttattgttttttattataaagggaatgttgttattttttatatctttaaattcatcatcattattaaaattagatagttcataaattggtatattattttcatcgtgtccatttaattgatactctatgttatatataattaaaattggatttaacttgttatagatgtaagaaatttcattcacacctattttcattatggatggagataccagtgtgttgagtaatagggtaaataattcgtctgattttaaaaagtcaaatctttcaaggaggatatactctagagtccaatcattattattaatgtagtgttgatttaaatctccatatgcatcttgataacgaggatcttcagaagctaaaatccttaagtttaaaatagaatcaaaaaattccaagggggaaatgtttttaaataactcagattccattgtcgccaaagtattaataatttctaatttgcattttttatcaataggtatagtaaacattttatcactttatgtaatgaattttttgtatagtaatataatcattgtgaatgataaaagtagtgttatttatttttattatatgtgcgaaatttttttaaaaaaaagttgaaataaattatttttaattatatgtataaaattaatatcattcaataatgacacttaatcagactatttttataaacacttcctcattgccccttaaccaacaatccatcaaagttggactctttgtaacagagagtccttatgaacaaacctatttcctttataatctgtttcactaccttatttataacggcttgtactccgaaagaaaaacttcagcaacttgaaactgaacctcgctcgatcattctcaataaaaacattcaaatagcacagcccgatctctatctaacaacaccaaaagttgtgcgttatgatcgctatctattgataaatacatctccaacgttggctcaaagtgacccgatcgaacaaataattgatgttcatatcccaacttctcaacaatcctctgttagtgatgcaatgcgttatattttacaaccgtcgggatattctttatgtaagacaacgtcgtctaatcaagtactctataaccaaaaacttcctgttgtacatcatcaattagggcctatgcgcttaaagcaggctttgcaagtattggcaggtgttgcatggcaacttgagattgatgcagtacaacgaataatttgtcattcattgcgagaaggttaccaattaccgacagaaatactcacaaactcaacattatcagcggataggatgttgcaatgaaaattcaatctatattgaattctcaatttttagtctcattggggattagcgtgttgacattgtcaacagaaggaatggcggatcaaagtcaacatcaagttttaaaaacagagcaacaggcattagaacaatcactaatcgctgaaaatgctcaagaatggaaattaacagagaaagaatggcaacgttatgaaatgctaaaaaaggggaaacgagggctgttttcaccgaatttagatcccttaactttattaggtattgaagctcgtacttatgaggagcgacgttattttgctgaattagtggtgaggcaagaatttcagcgtgttgaagcagaattagcctttcagcgagaggcgaatcaagcatggcttcgtctttatcctgaaattttaccaattcaaaatgaaatgagagaaagtcgtcaggctttatttgtaaaagaaagttgttctatttgtgaggtaaaactcgctcagcttatcaaactaaatcaacctattgatatctatttagtgggaagtggggggaaagatgatgtgatacgaaattgggctaaaaaacatcatattcctatcgaaaaggtaaaaaatcgccatatcacattaaaccatgataacgggatatggctaaagcatggcaatggaataatgcctgttgttttacaacaaggaacgcaaggatggcaaagagtcgattagtttttttatttatctccattgtttatcttggtgataatagtcgccgttgttgatggtttggtcagacgtgatttacgtcgatatggtgcagcttatgaatctagttttgtttatcatcatgctaagcgaataatcaagcccgcaatttatatcctctgtgtattgtatttatcattgccatttgcagtttatccgaatttcttgttgttgccttctatctttttgatagggatagctatttctgtgacaatagggtgttttaaaaagtatttgtagggattattcctttttattaattaagattaagattaagatgcgatggagttgctgatgcctgagttaacaatacgagagtgtggtgaggaggcaattagattaactaatgagttatttcaacagtctgagcaatcttttatggcatatttattaaatgaatcagacttagcatggtgtattgcaagtactagaaattttccgccagagaggcaacttccttgggatcacgcaggacaaacatttcaaaatgataatggatttagcttttgttttaagtttttagatatgcaaaataggcctgctggagcctgcatttgtgaatattgctctgataatgtattgaatattgaaatgattcagaactttcaaattaaaccatctattcttgatggaaatacgcttaagtttatgctttataccatagtgttttttctgttactgacacaagggacgggtgtacggctcatgtttcctataaatgaaaatgttgcaacatactatgttgaaaaacatggttttcaggatttaactggtgatggttcaaaagaaatactttaccgctcagcagaagatttattaaattggtttgagcaaaataaccgctcagttgatagtgagtgatttatgagcgatactataatgcaatcaacatggcaaactaaggagttgggtatggtaaccagaaaaggaaaatctgttacgcctgagtcttcgtttttccaaacgccacacattattcagactcgagaagatggaagtactgttagtactgtttgtagtcgtagtggaaaagaagtgacctttgttactccaaaaggaaaaaggatcagagcatcacagaatgaagtttttaatactttattgaaatctataaaatcagtaaatcattcataaaataaatagttattggatacagaaaaagagagtttagactctctttttgcatatctatggtgtagctagtggttttaattacaaaattaatttctgattactcaagctcttgatattttcttacggcaacaatgtgtgttgaaggattagcgactgcctaattgatctgctttaatcaaacaagacactttaataatggaatataatttaactattgaagtgttgaatgaaaaaacgaacaaaccgagtttatactcttgagtttaagcaagaagcggtcgcattagtctcaaaacaaggttatagcgtctcaaaagcggcagcttctttagggatcaccgataaattactttataactggaaagcaaaattcgacgctgagcaatccggtagtagcttgaattccgatgagagagctgaactattaaggtttcgaaaagaaaataaagaacttaggatggagaaagaaatcctaaaaaaagcagcgccctccagctaaaggaaaccaagtaacgtttaaaacgattaagcaattaccttctcagtttcccgtgcagaagctctgtaagttaatgaaaataagtcgttctgcctactacgcttggcttaaacgcccagcaaaattgatcaccgcagaaccaaagctatctttgaacagagtcgaaatagcttaggttacataacgtgacataaacggttatgcaaagagggctttagcgtgagtgcttatggcgttcaaaagctaatggctcagcttggcctagtcgtcactcagcgtgttgcttacaaagtcaccacaaaacgcaaacacagtgatgcggtagtcgataatttgttaaatcaaaatgttaatcctcacgcacctaacgaagtgcgggcgggtgatgtgacctatttaaaaacaggggagggctgggtgtatttagtcatcgtgatggacttatactcacgccgtattgcgggttgacacatcgataaacgaatgacggcagatttagttgtgcagaacaattagggcatgccagtattacatcgacattagaatacattgatgaaagtgttgataacttgcgagatatacttgaagcggaattgatgtgataagaataacaagaggagtatctagatttgacagtgattaggaaagaaagtaaaagtgacaaataaaaaaaacagccttgatatgagcaagactgtttagtttaagagttttaacataaagtgactgtgccaaattatattatttttcaactcttgtttgccctctcagtgatttaactcactgacgaacaaaagaaatatggtgcccggactcggaatcgaaccaaggacacggggattttcaatcccctgctctaccgactgagctatccgggcaacggggcgtattaaacccgatctcaccgtcttcgtcaacgttatttatcacaaaactgttcaatcgctgtttttttaatcttattgattaataaaagactctttttttcacagaatgagtaaaaagagtactgaagtgatttttgttgtcgcagagcaataaagaaaaaatgtagcgaagtgaacaaaagcagggtaccgataacaaaaaagcttacccaaattgattgggtaagctttatttttaaacataataatggttaacgatagttacgttgcgcggtgcttaccttttcaagataacgccgtgattggtcggccggatgtttattgcgcaatgtcgtataaacttccgtcggcgctaagttattaatcatcgcggctgcttttttcttatcactatggaagatgcgtaacacactacccgcaccgccattgtaagcctgtatcaccgcatagcgacgagaaacgggatctttaatgtcacctaagtagctattttgtaatatcgagatatacgctgtaccaacatcgatattattcgccggatcaaataagtaactgcgacttggctgtcctgatttaccttgcatacgaaatacatctcgtccggctgttgctggcataatttgcattaagcctagtgcatctgagctacttaccgcataggggttgaagctggattcaatttgcataatggcaaggatcagggaaggttcaacaccatacttggccgcggcttgttgtacataaggtaagtatttatgtgcacgtttatctaagtggttaggtactaagttaatagtgacataccaaatagtgttcagccctgattgacgtttttgtaatttattggcaattagataatctgcaaatttatttgctcgccactcccagcgtataggctgccctgtattatcaagtacttgtcctaataaaaaaggctctgtactgtggggaatattatttacatcagagtagaggtcgatagagccgggatcttctcccataagcaatgtcgtgacaatcgctttatgtaattggaattgaggcgcgtcaccccctagggtttcaatagtgatagtacccgcttcaaaattaatatggctacgagttctataagcgtccgtatattttacgtagtctttagggcctgcgattaatacttcctgcattccccaaatcatctcgatattattggcaaattgtcccattaatatatcgaaggcattggtgtctttgctgtaatcaggctcaaaagttttagtgggtttactactacatgagatgagtagaggggcgataatcagcaagagaaggatttttttcatggtctattgcatcgctctggtgaataaaactccagagccgtaatggctctggaaaatggatattatttttcaggtggtgtgtagccgtcaatatgaacatcgtggccttcaaataaaaatcttaccatctcttgttctaataatttgcgatcgtcaggattcattgtgttgagttttttctcattgataagcatggtttgctttgccatccattgaccccaagcttctttagaaatctcattgaaaatgcgttttccaagctctcctggatataactgaaaatcaagtccatccgcttctttatttaggaaagtacaaaaaatagttctactcataataaatcctcaaatatcgccggtattagcttaggctaattgtctaagtaaattctctacaggtgccgcaagccctacgcttgccggggtttgtaagttataccaaagtccttgttgcgcctccatcagagaggtaaacgtggagagttttacgcaaattggtactatatctaaatgaaaatggctaaaagtatgtctaaatgaaattaattgctcagttttgttattttcaagaccatgttcagctagccactgttctaaaagcatttttgtttcaaactgaggaaaggagaacagtcctccccatattcctgctggtggtcttttatctaaccagaccagattatcatattgtaaaataagaaaataagttgttttttccggaatagcctttttaggttttttccccggataatccgcccaactatggtgagcataagcaatacaacctgtatttaaagggcaaagttcgcattttggttttgttcgcgtacaaaccattgcccctaaatccatcattgcttgattaaaatattcaacccctttggttggggtgacttgttcactgatttcccataatttattttcaacttcttttttacccggccaaccttctacagcataacaacgcgctaaaacacgttttacattgccatcaagaatagggtaaggcttttttagtgatagcgataaaatagcccctgctgtagagcgtcccacacccggtaaagcacaaacgtcctcaaaggtatcaggaaactgtccttgatgcttatctacaatgtgttgtgccgccttatgtaagtttctggcgcgggcgtaataacctaaacccgtccataaatgtagcacctcatcaagtggcgctttcgctaatgcgctaacattcggaaaacgcgcaataaaacgctcaaaataagggatcaccgtggcaacttgcgtttgttgtaacatcacctcagataaccaaacgtgataaggcgttttttcttgttgccaaggtaatgttttgcgcccgtatttgtgataccagtcgagtacgacttgcgagaactgctgtgcatccatcatattttatttttaactcagatctgtataagggtaagattgcaccacagagagcataaactgtaaacacccttaatatttatcttatagagtgatgcttatataggtgactcttgctaaaattggctatctttggataatgtcgcttaaatgtatactataacgacattataacgttattaagttaataattggcctaacgactgacagtattagacatgatcaagaatgtaatttctccggaattcaatgaagaagggcgtgctttacgacgcgttcgtagttttgttcgccgacaaggccgtttaactcctcgtcaggaacaagcattagaaaagcaatggcctatctttggcattgaatatcaaccggaacctatcgacttcagtcaggtttttggacgtaacgcccctgttgttttagaaattggttttggaatgggcgcttcgttggtgactatggcaaaaaattcgccagaaaataattactttggtattgaggtacatgcccctggtgtaggtgcttgccttgccagtgcacaagaagagaatatctcaaatctgcgagttatgtgtcatgatgcgatagaagtactcaatcacatgatcccagataatagtttacagatggttcagttgttttttcctgatccatggcacaaagcgcgtcataataaacgtcgtattgtgcaagtaccatttgcagagttaattttaactaaattagcgccaaacggtgttttccatatggcaacagattgggaaccctatgcagaacatatgcttgaagttatgacaagtgttgatggatatcagaacttatcagaaactcaggattatgtaccacgaccagaaacacgccccgtgactaagtttgaacaacgcggtcatcgtttagggcatggagtatgggatcttatgtttaagagggtaaaataatggctaaacaacgtagtcgccgtttacgcaaaaaaatgcgtatcgatgaatttcaggaattaggtttttcagttaaatggacgttcccagaaaatacccctattgaggaggtcgacagctttgttgatgactttatccttaatgtgatagagccaaatgggctggcatttgatgcgagtggttatctgagttgggaaggcctgatctgtctacaaaaaattggcaaatgtaccgaagagcatcgtcaattagtagaaaactacttaaaagaaaaaaatatgcaagatgtacagacctctgaactatttgacgtttggtgggactaataaaaagttatacatttttagcaaataatcacaagggcatccaacaggatgcccttgtctgtctagggaatcagctgtgactacaacgttatctaacgcattattgtcagatatattgcaacaaattcgtcctttaattgggcaaggaaaagtagcagattatattcctgctctcgctcaagtacctgctaatcaactggctatggccgtgtatacggttgatggtgagctttatcaagcgggtatggccgataaacgtttctctattcagtctatatcaaaagtacttagcttaacccttgcgttaacacgttatgatgaaagcgagatttggcaacgagtaggcaaagagccttcaggattaccttttaattcgttgatccagttagaaatggaaaaagggctaccacgtaatccttttatcaatgctggagcgatagtgattacggatatgttgcaatcgcgattaagtgcgccaaaacagagaatgttagaagttattcgtgcactgacgaatacagctgatatttgctataacaccgttgtggcaaaatcagagatggaacatttaagtcgtaatgctgccattgcctatctgatgaaatcgtttgataattttgataatgatgttatcaccgtattagaaacctattttcactattgctcgattgaaatgagttgtgtagagcttgttcgttgttttagctacttagcgaatcaaggaatatgtgttggaagtaaaaatcagattattacgccaagacaagcccgacaaataaatgcgttaatgttaacttgtggtatgtatgatggtgcgggagagtttgctttccgtatcggtattcccggtaagtctggggtgggaggcggtattattgctgtggttcctgatgcctttaccgtagcagtatggtcaccagagttggataaatctggtaactcattggcggggtgtgctgcccttgaattattagcaaacaaagtagggcgctcaatattttaagtggctgtagcgccaagaatgcgcaatgttaggtaaaaaaagtagttcaatacgcttctaggagagcgattatgggatttaaaaagttggtcgttgcattggtttttgtcgcaagttcagccactgctgcacccagttttgactgtgctgtcacgccaaaagatgatttacgtattacacctgaatttgttgaagtggccggctctaatggtttacttgttatttatcccgatggcacgttactgcgcgatgaaaagagcgtcacactaacccctgagcaacaagctattgcgaaaaaatatcaagcgacagttaggcaagatattccttggttaagaaaagagatgggaattaaattacaagagtcaagaaaagtactggataaagttgttattgaagcctttgggcaagatagccgtattttaaagcgcttaagtgacttagaaaaaaatcttaatcaacaaatggatactgttatttcgctcaagcctgataatgtcacattccatgctcaagcgattaaacaggtcgaaaccaaagggcgagaaataattgagagtagccttggggggatgttgcaagatagcattaatgaattaggtcaaaaacaattactagctgctgcgagtggtgataggaaaaaagccttaagtggattattaggtaatcttgatggttttcagcaaatcatcgaaaaagagtggaagcaacaagaagcttcatttaatcaatttgggcagcaggcatgtaataaaatcacccaaatggaaaaccaacgtgtcgaattgataaattcactaaacaaatagctttatccttacagtaaataagagttatagattgttgattcacaatagttgaaaataacaatgaaaatcattcttattcaattgacatgtaaagtaagctgtttagaatgccctgcttaagtattccacttaaacagggctaaattcatgaaaaagatccttgcgttagttactgcctctcttctgtcagttagcagtttttctgcattaagtaatacctcagttacataccagcctaatcaaattgttgaacagcaaaatgataaagttgttatcaagcacctattaggtgaaactgcagtatctaaaaatccgtctaaggttgtactgtttgattttggtctatatgactctttagttgcattaggtttagcggataaagtggttggtttaccattaggaaatgcacctgaatatattaaagggcgtattgcgaatgatgtggctaatgttgggggaatgaaagcccctgattttgagagactcgctgagcttaaacctgatttaattattattaccggtcgtcaaggcgcttcttatgagaaactcacaaacattgcccccacgattaatttaggtacaaatagtgcgaattatcttgattcagtggaagcgaatattcaattaataggtgaattatttgataagcaacaagctactcaaacacaattagcaacattgaataccgtgattgaacaggctcagaaaaaagcggcaggatcagataaaaaagtgttggtcttactgcacaatgcaggcaatttaatgcccaataaccaaagcgtgatttacgatgtggttaaagcgaagaaagcagaattaccacctgttgctgaagaagagaaaggcaaacgtcgcgtggttacttctgaaatgatcgccaaagtaaatccggatgttatttttattatcgatcgcagtgaagccattggtgccggtaaattagagaaaaacacctttgaaaatgatgaagtgaaaacaacttctgcttataaaaatggtggtattgtttatttgcaatctgatctttggtatctctctggtggtggattagaaagtcttactcagcaaattgaagcggtgcaaagtgcactttaaaatcagtgatagtggttataagcgccgataaataaattatgcccatagtgtaaatgaacagtatgggcatttgtttattaacgaaataagtgaattttcgtattaaagaaagagttcaagtaatgaattaagaaacagtttaccgtggggcgttatctgccaatgggtttctgtttcactgatataacctaatgcgagtgcttcatcaatttgcctacggatagtctcttgtgcaagccccgtgtagtcgctaaaatcttgccgaggaaaagcttctaataaccgaaagcggttcataaaaaattcaaatggacggtcatcattatcaacccaattttgctggtgaagataacgtcctgccataaaacctttaggatgtttggtttttaccgttctcataattcggccatcggcaaaacttatttttccatgagcaccacagccaatacctaaataatccccaaaacgccaatagtttaggttatgttgacattgaaaacctggcttacaataagccgatgtttcatattgttgatatcctgctgcggtgagtaatttgtcaccttcagaaaaaatatcccataacatatcatcatcaggtaatttaggcggacgggagccaaattgcgtattgggttcaatagttaattgataccaagaaagatgtgggggagataaagcgattgcttgttgtagatctgaaagtgcttgagataatgattggtcaggtaagccatgcattaaatcaagattaaagctacgtaagcctaactcttttgctagtctcgcggcatttttagcttcatcggcatcatgaatgcgtcctaagcggatcagtttatcattaccaaagctttgtacaccaatggatatacggttaattcccgcccgttgaaaaccggcaaatcgttcagcttcaaccgtaccaggattggcttccatcgtaatttcagcatcaggagcaacggctatgcgctcttttacgccatacagtaaatcagccattgattcagcacttaataggcttggcgtgccaccaccaataaagatagtttgcacttcacgagagccaacatgagtaagatcagcatctaaatcattgagcagatgttgcacatattcctgatgtggaacttcgccttttaaggtgtgagaattaaaatcacaataagggcatttttgtacacaccaaggaatatgaatatacaaacttaatggtggtaacttaagcattcttaagtgcatccaacattagttttagtgctttaccacggtgagagtattgatttttttgctctctggttaactgtgccgcagtgcaatttagctcagggataaagaaaataggatcataaccaaatccaccatcaccttgcatttcttgagttaacacaccttgccaaataccatggaaaattagcggagtgggatcgttttcatggcgtagataaactaacacacagttaaactgagcttgacgtttctctgcgggaacatctttcattgcttcgagtaatttatctacattttgctgatcggttgcctcaataccagcataacgagcagagtaaatgcccggagcaccacctaatgcatcaaccgagatccctgaatcatcagctatagccggtaagcctgttactttggcagcatgacgcgccttaattagtgcgttttctacaaaagtaagacctgtttcttcaactgagccaacacctagctcagtttgtgcgacaatatctaaaccaaaatcagcgagtaatgaggctaactctgttactttaccggggtttccagtagcaagaaccactttttgcatattatcttccttagtaaagtgtcatggtgattagccactgtaaaacatctacacgtaaataattaagggcataaaggatcaggataacaatcatggctgagaaatctaatcctcccattgccggaataacacggcgaattggggccattaaaggctcagttaattggaagagcagatgatcgataggattacgtccttgactgacccaactgagaattgcacggatgataatcatccaaaaaataatcttacctgctgcggtgagtaattcaataaatgcgaagggtaggactaaagaaaatggaatagcaccacctgctccggataagtaagaagggaggataatttctaataacactaaaacatatgccaagatgaccgaagcagtatcaatagagccaatagaggggataattcttcttaatgggcgcacaacaggttgggtaattttaaccacaaattgtgaaaacggattataaaaatcagctcttacacattgcatccatacacgaagtagtagcacggaaatatagagttgaataagagtcagaatgacgaaatttaaaaagttcattagttggccctgatgaaattaaaactgtttttccatttcttgcgctcgtttaatcgccgcttgcatcgctaaagcaacattctcaggtaatttacctgcatagaattgtgccaatgctgcagctgttgtgccaccttttgacgttacttgttcacgtaatgttgaaaaaggtaagctattttgtttttcagctaatgcagtagagccactggctgcttgttgtacaatagctcttgctacgtcggctgaaaaacctaagcgctcggcttcttgttgcatagattccataaacaagaagaaataagcaggcgcactacccgcaacggcgataatatcattgatagctgattcttgctctacccaaaccgtcataccgacacttttcattaacgcatcagcaaattgtttatcttcaggggtaatagtgttttgagcaaacataccgcttaaccctttgccaaccagtgctggggtatttggcatgatgcggatcagtcgtagcgaagtggctaaataatcattataacgagaagctggaatacccgcggcaatggttagtactaatttttgactaaaatcgatatgttgtaatggcttacaaacttcagccatcatttgcggtttgacggctaatacgatgacatcggcattttcaactgcattgatgttgtcgcaagtactctgtatggcaaactctttttctaaaggctcacgtcgaacctcagaaggtgaacttaccgtaatattttttgcgggataaccaccattaaccagtcctgcaataatagcgtgtgccatatttccggcaccaataaaagcgatattgcgatgttccatactaatttaacctcttttttatttattggcgtaatcacgagcgccaaaaatggccgttccaatgcgtaccagtgttgagccacaggcaattgctgcttccatatcaccagtcattcccatcgacaatgtatcaatatcggggtactggttttgtaactgtttaaatgcctgatgcattttttctagtacctcgacttgcttgttatagtcattttctggggcaggaatagccattagtccgcgcagtttgatccctggcagaatggatatttgtgcagcaaggccatcaagctcggtaagagagatccctgatttactgttttcatcactaatatttatttggatcaaaacattgagtggcggtaacgtagttggacgttgatcacttaatctttgcgctatttttaatctatctatggtatggcaccaggcaaaatgttcagcaacaagacgtgttttattggactgcaatgggccaataaagtgccaaactaaatttttgttttcagcaaaatagctgattttatctacaccttcctgcacatagttttcaccaaattcagtttgtccacatgcaattgctttttcgatatcgctcacaggcttagttttactaactgcaagtagagttatttcgtctggagaacgtccgcatttttgcgctgcggtgtcaatgtgagacctgacattgacgagattctgtttaatagtattcatggcaactcaggagataataagatgaatatggaaaaattaattatatatagtgtaaagcataatgcttccgatctgcacctttgttgtggcgatgtgccacgattacggatcaatggcgtactttatcaacaaaatcaatgtaaacctattacttctgatacgctactcaaatggataacaccttatctgaccacagcgcaattgcaattttttggtaaggaggggcaagttgatacggcgataactcttgctgaggggcagcgcttacgagtgaatttatttcgccaacaattagggatatccgcagtactaagagtgataaattcacagctcccgacattaacatcactacgcgtaccaaaatcaatcactgcattattagataatgtttctaatggacttattttagtgacgggagcaacagggagtggtaaatcatccacattagcagcgatgattgattatctcaatcagcataagcgtcagcatattcttactttggaagcgccaatagagtttatttacaccaataagcaaagcattatccaacaacgtgaaatagggcgcgatgtacaaaatatagcgagtgcaataaaagccgcattacgtcaagatcccgatgtaattatgctaggggaattaagagatctagaaagtattaaaatggcattaattgcggctgaaacggggcatttagtactagcaacattacatacgcaaggcgttgttcaaacgttagagcgtgtcactaatgtattttcatccaatgaacgacaatggatctcggcacaattagctggaagcttaaaagcaattatttctcagcaattggttccagcaacacaaggcgggcgtgttgccctgtttgaagtgatgtatatgacgcaggggattgcacatctgatcagagaagggaaatatcatcaagtgacgacattaatgcaaactgggtttgaatatggcatgcaaaccttcactttaagtcgccaacaacgtcaatatgaaggtttgctcaatgagcacatcaatgaagaaaattaatactgccgttcaaaccagctttctaaaataataacggcagaagttgcatcaacactgcctttatctaaagagcgataccccccttgttcaaaaaggtgagcacgggcttctactgtgctaaggcgctcatcatgtaaggcgatttgtacgccaaagcgtccatgtaagcgattagcaaattttttggcttgggtagtcactagctgttctgtaccgtccatattaagaggcaaacccaccaccactaaatccggctgccattctttaatgattttttcgatttgactccaatctggaataccatctttagctttaaaggaggctaatggccttgctgtccctgtaacttcttgacctattgcggctccaatacttttggtgccaaaatcaaaccccattaccgttctatttgacattatgcatgaccagccgttggtgaaattgtgtggatatcgataccaattagttcggcggctttatgccaacgctctgcaattggggtatcaaaaatgatttgtggggttgcttcaacggtaagccaactattttctaaaatttctctctcgagctggcctttttcccaactggaatatcctaatgagactaaggttttttcaggctgtcttgctgtacctaatgtttctaacacatcttttgacgtggtgatcatggtgctatcgctgattttaatacttgagctaaaaccagaaacaggggtgtgtaagataaaaccatgctcttccgctacagggccaccagacataaccggtttttgtaagctaatcgcactatctctatctgctgagaatatctccaactgctctaagacactttcaatagagatatcttcaatcggcttattaataactaaacccattgcaccgttttcattatgttcgcaaacatagacgaccgagcgttgaaagagcggatcgcttaatgatggcatagcaataagaaaatggttgagtaaattcataatagtaatactgttctctgattgtttttattaaaaaacctagccctattgataatgtttaatataagggctaggtaaagacttttaaaccttaaaacacatcgtttaaaaattagtttttcttgttaaggcgagcttcaatagcatccattaacatacctgtaatagaaacctcaggataagctgcttcaatctcacgagcacaagttgggcttgtaacattaatttccgttaaacgatcaccaataacatctaatccaacaaaaataaggcctttttgttttaagataggtgctacttggcgtgcaattgcccaatcgctttctgttaatgggcgcgcttctccacggccacctgcagctaagttaccacgggtttcccctttggcagggatacgggctaagcaataaggaaccggctctccatcaactaccagaatacgtttatcaccatcaacaatttctggtaagaaattctgtgccatacagaaacggtgaccgtgctctgttaaggtttcgataataacaccgacgtttggatcatcttttttcaggcggaaaatagaggcgccacccataccgtcaagtggtttaaaaatcacatcaccatgtttttcatggaaagcgcgaaggtgtttggcttctcgagtgactaatgtatttggcgttaatgaagggaaccatgctgtaaacagtttttcattacaatcacgtaagctttgtggtttattaacaattaaagtccccatatcttcagcacgttcaagaatataggtagcatagataaattcggtatcgaatgggggatctttacgcattaaaatggtatcaagggagcctaacgcaatatcttgctcttgaccaaattcaaaccacttttcagggttttcttccacacttaacagacgtgtgtgtgcacgggcttcgccttgattaagataaagatcgttcatttccatataatggatttcccaaccacggcgctgtgcttcgagtaacatggcaaagctggtatcttttttaattttgatggatgaaataggatccatcacaatacctaatttaatcattatttctcctttatcccagatcgccgaaccgaacctgcaaagcggtgattgcggtgagtgctgttgtttcagttcttaatacacgaggacctaataaaatatcagtaaaatggtattttgctgtcatggcaatttcttcaggggataatcccccctcagggccaattaatagtcgtacttttttaactggaagtggcaaggtattaatactttggcttgctctagggtgtaaattaagttttaagctatcatccgtttgggcacaccacgcctctaatgacatcaccggcataagctgtggaattttatttctgccacattgttcacaggctgagataataattttttgccattgctgatgctttttttctaaacgactaggatctagtttaacaccacaacgttcagagatcagcggagtaatagtgttaacacctaattcaacggacttttggatagtaaactccattttttcaccacgtgaaagtacttggcctaaatggagatcaagtggggattctctatcatccatttgtccttcattaatctgcacaatcactgattttttgctactttcgataatatcagcatcaaatacttgattggagccatcaaaaagtgccagtttttggccttttgacattcttaatactcgtccaacgtgatttgcagcttcttctgctaatgaagtttgtgtacctgcactgagtggctctggatgataaatgcgaggaatacgcataacgtgaaacccttacgtaaaatgttaaccatgataaacaagatattgtgatatgcatcatacgcatgccattagctcatgcaagttatcaggtggctttttctatcattatagctggattttatttgcgagatttgtcgtaaaacttcatgtttgcaatatgataaaacaaccattgcttggaagtaatagcattctattttagagtcctagattaggaactcgcaaatatcaaggatagatatttatgttattaccgcaaaacatcatgattacaatggccttttttacctttttaaaagggtgtagcgattatttctctacctctgttttagcacgcctctcacctattcgttatcagcaattgtggcaagtctatttaattatctgtttttattggtcttttactatttctaattattcgttattaatattatttctattgtttagtttttacctcttaactctctcgtttttcgatgcagattatcttcagctacctgataacttaactttttggttacttttctttggaattacgcttaatttaacgccttatggcgtgatttcttcaacttgctctttttatggctgtttagtcgcaagtttgtttttttatagtatttattggctcggttattggatatatcaagaggctattttggggttgggtgatgtaaagctttttagtgccataggcgcttggtgtggaatagaactattaccttatatcctctttttcgctgcactattagggattgttatttatatgcttatttgggcttttactaatgtgaagataaagcagattgcctttggctcttgccttgcattttcagcgatagttgttttaagagtaaagacaataataatgtattgaataggctaatatttcttgctgaatattaaataagagtgaggtgtagaatttgtctacaccttcaagtctctatcattatttactctattttcagtaaggtattacagcgtttgctttagaaaagaggtccaactttttgtatcgccaaaataattctctaccgggatcaactggtaggtttggttatcttcaatacatagcgttgggaaaccacgaccatttacttgatgcattaattgttgagtttgctgtatatgttgagttatttcatactcatttacttgcgtaaatagcgtcgaaaaaagggtgatatcaaacccgagtttttgtacgataaaaaatagcacatctttatcactaatatttaatccatcaagataataggcatcttgtaacgcttttaataacatgacatctctatcgcccatttttcttgctaccaatatcgctgcaattggcatcagtgagtttaatgtcatctctgtattggcgaggttatcacggtattgctggctaaaaatttgtcccgataactggctaatacgttcatcgataggggtaacatgctctttccatgcatcgccccctgtcacttttcttgtcggggtaaataatcccccaccatgtagtgttagtacatgtgggtattcgtgactcactacttcaataagtggggcaatgccgtagcaccacccacaaagtggatcgtaaatatagtgcagctttttggtgctattttcttggttcacatggcttactgaggccatttcatctctcctttaaggacttttgcgctaagctctaaactcgatttatctgctaagtcaggataacttttttccatcgccgcaataaattgttctgagttttgagtttcagcgagtttagtttctgcctctttaaggtaattcattgtgaaatcaacagaacgcatatcataattactttttggaacataatgtcccggaataaccgttttaggtgataacgttttaatctgttgtaacgcttctagccaatattggcgttgtgctttagattgagtatctgctagccacacatgaatattttcagacagtattaccccacccataatagcattcagttttggcacataaacataggttctttctggagattggctatctaatcctttgatatagagtttttcaccttcaagagaaaaactatcaccagtaacgacttcaggaatgataacttttttaggggcattgtctttgaggacaggcccccagtaggcaagttttcctgcttgggtttcattaatgattttgacggtgggagctgaggcaatcactttagcatttggaaatgcttcagtaatgacatctaacccaaaataaaaatcgggatcagaatggctgatatagatataagttaaatttttccctgatgctttaattttatcgactaaggcttgagcatcatttttttggaattgagcatcgattaagacagcatctttatcaccataaatgatttcagatgaaacagggaatacactggcatcaccggggttgtagatatctaatgttaactctgttgccataacagaagtggcgaaaaacgcagtagttgcaagtgttaaaggaagtaattttttcatctttattttctccatcatgttgatgcgttctataataggttgcatgaaatgggagaaaaaccctgttttggtgaatacattgttgcataaatcgagcaaataatatggacaaaattaaagcatcagaggtttttgtgaccatcgttaagcaaggtagcatgattaaagctgctgattatctaggtatgtctagagcaatggtgacgcgctatcttaatgaaatggaggagtgggctggggtgcgtttgttgcatagaacaacccgtaagcagagtctgacttccgtgggagaattagtttatcaacaaagtttacaactgctagagatggcggagcgtattcccgcgaatattcccaaagagagtcaccaaatcagtgggctggtgcgtattacaacggcacaatcactcgctaattgtgcattatctgtggctataactgaatttatacaactttatcctcttattgcagtcgatttgcaaatatctaatcagacagtcaatcttattgaagagcgtattgatattgcattgcgtattaccaaccatttagagcctaatctgatagcccgccctttagcaaaatgtttttctgtggtttgtgctcataaagattatttagctaaacatggtatccctaacacgccggatgatttgacttatcatcaatgtctcacatatcgcttttttggcagtagcttatgggagtttagtttaggtgatgagcgttattctgttcctgtaggtggtaatttaagtgccaatgagtctgttgtgttattgcaagccactttgcaaggtgccggagtctccttacaaccttactgctcagcaaaaccctatcttgaacggggtgagttagaaattttgttagcggattatcagccacagcctatgggaatttatgccgtgttagcgagccgacaaaatatgcccgcagccgtgcgtgttttactggattttctggttgactggtttgcttcttcgcctcattggttgtcattatcgggtgaacgcgtgagttaattgttttggataattggctaaagtggttttcatcacatcaataaaatagcgcacaagttgtgatgaggggcgatgagatggtgtgatcaaactcaccgtaaatggaatggtaaaactcagtggccgtatacagagatcactatattgataatcaagggcagtaatagggttaacgatagaaacaccaatgcctttactcaccatggcacaaattgaggccgcactttgtgtttccatgatcaattgtcgagtgatcccctgtttaataaacatagcatcaataagttgtcgataactatcattagcagataagctgataaaacgagtttgatgaaagtcttgtggctgcagtaatgcttttttacttaacacatgagactttggcaaaatagcgacttcatttaacgttagcagtgtttcttgttgggttccggcaggtgtttgtgtgtgctctgttagccctaagtcataatgttgtgcagataaccactcctctaataaaggagactcctgtggcactatcgttaaattaacctcgggatattggctgagaaattgttggcaaattgagggtaatagtgattgagcaaatgccggtaaacaggtgatatttaattccgcttgatgaaaatggcgaatactattggctgcggtaataatgcgatcaagtccataataagagcgctgtacctcttcaaaaaatcttaatccttccgtggtaggttgtaggcgacctttaattctatcaaatagcttaaatgacaatagctgttcaagacgtgatagttcgcgactgactgtgggttgagacgttttcagtaaatctgccgcttcggttaggttttgtgtggtcatcactgcatgaaaaatttcaatatgtcgccaactaaatggagttttcataaattttatcctatatcacaagtgaatagactatagctaatttgatatttttattcccgctttaattgcttaataatatttttattcaccctacattgctgagtaaaaaatgatgacaacatccaacaatgcgatcctatctcaattagcacaaacttatggcacgccattatggatctatcaaggtgagactatttctgaacatattgagcaattaaaagcctttgatgtggttcgttttgcacaaaaagcctgctctaacattcatattttacggttaatgaaacagcagggcgttaaagttgattctgtctcactaggtgaaattgagcgggcgttggttgccggtttccaaggtggtcgcgagcgtagtgaaattatctttaccgcagatttactcgatgaaaaaacgattgaacgtgtggttgaattagatattccggttaatgcaggttctattgatatgcttcgccaacttggagaacgtcatcaagggcacgcggtgtggataagaataaatcctgggtttggtcatggacatagccaaaagaccaatacgggtggggaaaatagcaaacatggtatttggtatgaagatgtgccagaagcattagcggtaattaatcaatacaatttgagtttggttggtttccatatgcatattggctcaggggttgattatcagcatttagcgagtgtctgtgatgcaatggttgagcaagtactcacctctaatgttgatattaaagccatctcggccggtgggggattgtcaacaccttatcagcaaggagataaaagagtcgatttaaaccactatttctctttatgggatagtgctcgtcaacgtatagcgcaacaccttgggcatgatattgaactggaaattgaaccaggacgctttttagtggctgagtctggcgtgttagtgtcacaagtaagggcggttaagtcgatgggaaatcgtcattatgtgctggtggatgcagggtttagtgatttaatgcgcccagctatgtatggtagttaccatcaaatcacattattagataaatacggccaattaaaatctagcgagtttcaacaagaaaccatagttgcggggcctctttgtgaatctggtgatgtgtttacccagcaagaaggaggaatggttgctcctcgtttattacctccggcagaagttggtgattacttagttattcatgatacgggggcttatggtgcatcaatgtcatctaactataatagtcgtccccttattcctgaagtgttaatttcacagggcatacctcaattaattagacgtcgtcaaaccattgaagagctattagcgctagaaattaacctgtaacttttactattcctcccagtgtgatcatctcccaataaaaaacacctcattattaaattaaaataatgaggtgttgtatccgtgtttcagtcgttaaatggcagactatttattgacgatcataacggcataattaggctgctttatctgtttttattgtatcagttgacgacttttttgccggcaccgccaaggcatcaaagtcaaattcatccacattaatactacgtaaacggctttgctccgctttgcgtaagatatcagcttcttcgggagtcactcgtttatcggctaaggctttatccgctaatttatctaattgagtgaagctaaatttcttttcatagagtcgacagatacgttcaaacagtggctctgcggctaaaatatcgagcagagcttcttccattaaaccatgaggattgtgctcactgggtgtgaggaattgtcctttaccaatacgatcacgggtttcagaaggttgttggataatttgagccactttactatctaacttatctgaaggcagtttctgcactttacccagagggaaaataatggcgcgcagagctcctgcaacaaaacgatttgggaaattgcgtaatagctcatcaatggcattttctgcttggtataaacactctttaataccccagtgtaccagtggtaaatcagcggtattacgaccttcatcctcataacgttttagcaccgcagaggcgaggaaaatatgacttaaaatatcgccaagtcttgcagaaatacgttcacgacgttttaaactaccacctaaaacccccatggcaacatcagaaagtaacgccatgttggcactgagccggttaatttgttggtaataacgacgagtttcatcttttgttggcgcggtacttaagcgaccattagtgatacctaaccaaaggctacgtaatgtattactggcaacatggcctaagtgaccaaataaggcatgatcaaagtcgtgtaagttgttatctctagccgctgcaatttcatctaaaacataagggtggcaacgaatagccccttgtccataaatgatcatgctacgagtgagaatattagcgccttccaccgtaatggcgatgggggagccttgataagagcgagccacaaagttggaagggccaagacaaatccctttcccaccaacaatatccattgcatcaataatcccgcgttgcgctctatgggtacaatgatattttacgatagcagaaagtacggcaggcttttctcctaacataatacctgtggtaattaaggttgaagctgcgtccaagagataagcattaccagcaaggcgcgctaatggctcttcaattccttccatcttcccgataggaagcttaaattgacgacgaattcgagagtaagcacctgttgccattgctgcactttttaagcctccagtggagttagatggcagtgtgataccacgaccgactgaaagacattccaccagcattctccaaccttggcctgccatttttggaccaccgataataaaatcgataggaacgaaaacatctttaccacgagtgggaccattcataaaaggaacattgagtgggaaatggcgatgaccaatttctaccccttttacgtcggttggaattaaagcacaagtaataccgggattttcattatcactcagtagatggtctggatcgcgaagtttaaaagcgagtcctaatactgtggctataggtgctaaagtaatatagcgtttattccatgtgagacgaataccaaggacttgctcaccttgccaatctcccatacaaaccacaccactatcagggatagcgccagcatcagagcctgcttcagggctggttaatgcaaagcatggaatttcatcacctttggctaaaccaggtaagtaacgttttttctgctcatcagtaccataatgttgcaataactcacctggacctaatgaattaggtacacctacagtgatggcgagaataccagaaacacccgcgagcttttgcagtacacgagattgtgcataggcagaaaactctaatccgccatactcttttttgataatcatcgcaaagaaacgatggtcttttaaatattgccaaatctcaggaggtaaatcagctagttcatgtgtgatttggaaatcattggtcatgcgacaaacttcttcaactggaccatccagaaaagcttgttcttcagcggtaagttgtggcttaggataattgtgaagttgtttccaatctggtgctccacggaataattcaccttcccaccatgttgttcccgcatcaatggcctcttgctctgtcttagacatagatggcatcactttttggaaagcctttagtgcaggggctgagatatatgctttgcgaatagaaggaagagtgaatggtaataatatcaatgcaacgggcagtaatagccagtagctccagatattggctaaacccatcacgaaagtataagcaataagtaagatactgcttactacaaggctgtattttcggtaactaagtataccgatgagaactaagaaaagcacaatactgagtagggtcataataaaactcctgtatttgcaagacatcagaggtcagacctgttgtgtgttatttagatctaatgcagtcaccaagttttagcaatatttttacattctaattacaatgtagctcacaaattattcgtaaatgagagaagttagcatttgtaggtaaagaggtgcttctttcgtatcattggatccgttacactgagaaatagatattttttgatcccttttctggagtaaaaatcctatgtaccaagatcttattcgtggcgaattaactgaagcggcagatacactctctcgttttttacaagatgatgcgaatattgaagccattcaaaaagcagctgtattattagcagactcatttaaagcaggcggcaaagttttatcctgtggtaatgggggatcacactgtgatgccatgcattttgcagaagaattaacggggcgctatcgtgaaaatagacccggttatcctgctatcgcaatttctgatgtgagccatatttcttgtgtgagtaacgactttggttatgaatatgttttttcacgttatgtggaagcggtaggtaaagagggtgacgtattactggggatctcaacttccggtaattcaggcaatattattaaagccattagtgccgctcgtgaaaaaggtatgaaagttattactctaacaggtaaagatggcggaaaaatggcagggagtgcagatattgaaattcgtgtccctcattttggttatgccgaccgtattcaagaaatccatatcaaagttattcatattctgatccagctgattgaaaaagaaatggaaaaataacgatatagtaatattgccttatatgaataattaaagtgtgagtaagtaggagcgggcgatgtgtgaattgttgggcatgagtgcaaatgtacccactgatatcaattttagtttaagtggcctcattcctcgtggtggtaaaactggccctcataaagacggctggggtatcaccttttatgaaggattaggatgtcgtacatttaaagatccacaagctagtgccgtttcacccgtcgctcgttttgtacaagaataccccattaaatcacatgctgtcattgcgcatattcgccaagctaatcgaggtaatgtcagtttagaaaatacgcatccttttacccgtgaactgtggggtaaaaattggacttatgctcataatggacaacttaaaggttatcaatcactggatacagggcgttttagagcggtaggacagactgatagtgaaaaagccttttgctggatattaaatcagcttgaaaagcgttaccagagaacaccatctaattggccggcggtctttcgtttcattgctattttagctgatcaattgcgacaaaaaggtgtgtttaatatgttgttatccgatggccggtttgttatggcatattgttcaactaatttacactggataacccgtaaagctccttttggtaaggccaaattgctggatcaagatattgaaattgattttcagcaacacactaaagcggatgatattgtgtcggtaatatcgacattacccttaacaggtaatgaatcttggcaaaaaattcctgttggtgagtttgttttatttgatcgtgggttgcgaattttgtaaccatttactatcgatacttttagctaaatttaatgtggaaatagcctcacgattattcaccaaatagcgaccgttttttacactaatcgatgggatctttttgtattcttccacatattggtaagcaggtgctaactgttgccaaaaatccatattggcagagtattggaattttttcatattttcggctgtcattttaaaagggaaaatatgaatattaatgctctgttggccatttttcagcgcaagttcggcatattggtagatttcatccatcacagtatcggtcattgcgtagcaacccactgatttacaagcaccgtggatcatcaagaaatcaccggtataaccttgctcttgatcgtattgattaggaaatcctaggttaattgctcgataaaaccgactatttgggttaagctgagtttgattaacttgataaaagccttcgggactttttaaatcaccttgatatttcttcggacctaatcctcccgaatagctacaaatgggataagtacgtattttctctaattgtccatcctgtttttctatatacagttctagtaagttttcttctttaaatatttgaatatagatgggctctcctgtactttttttaacaggtttgataagaaattttgaactattttcagcgttaacaaataatgaggttaatattattgttaaaaatatgattaattgttttgcgtgactggtcatggttttatcaaaaaaaaggcttaaaatttgttgataaactagattgtagattgcaatgaagcaatcaatttgtaaatttaaatctactatggtttcttttctattacaaaatattctgtataaaacttaatcgttggtcgagaaatgtgatattttaattcggtttatgcgaattgttaacgtttcagtcaaaataatattcccatttgcttgagctaaatcactcgaatagtcagacaggctgaaactgagatgataaaattcagatcggcagaataagagaaaatagtaacaattatcggagataaataacttagggtatcaaactaccttaaggtgtttttattacagagtcgctacattttcggggtgaatttgtagcttagggtttaactgataaacttgtgcaaatcttatgattaaaattaaaaaaggactcgacctcccaattgcaggagcgcctgcccaagtgatagaagacggacccgcgattcgacacgtagctttgctaggtgaagaatatgtcggaatgcgtccttctatgatggtttcggaaggtgagcatgttaaaaaagggcaggttctttttgaagataaaaagaaccccggtgtaatattcacaagccctgcgtgtggtaaagttgttgccattaaccgcggtgagcgccgtgtacttcaatccgttgttattgaagttgacggcgatgaagaagtcactttcgacagttatgatagctcatcactttcagaattgacccgtgaacaggtagaaacaaacctagtaaattcaggtttatggacagcgttaagaacacgtccatacagtcgttcccctaaattaggaaccacgccggtggcaatttttgtcactgcgatggatactaatccattagcggcagatcctactgtgatcattgaacaaaacgagcaggcttttaacgatggtctgattgttttaagtaaattaacagagggtaaggtgcatgtttgtcatggtgaaaaagcaccggctaaactcaatgatggacaaattagctataaccaatttgttggccctcatcctgcgggattagtgggtactcatatccattttttagagccagtcagcgcgaaaaaaatggtatggcatcttaactaccaagatgttattgcgatggggtatctctttactaccggctctttatataccgagcgtgttgttgcattagcgggacctcaagttaaagcccctcgattattacgtacctgtttaggtgctgatctttatgaattaacgaaagatcaattagtcgatggtgataatcgtattatttctggctctattttatggggttggaaatcggacgaagcgcatcactatttaggccgttttcataaccaagtctctgtattacgcgaaggtcgtgaaaaagagttatttggttggggttatccaggtactaataaattctccattacacgtaccacaattggtcacttcttaaagaacaaacgttttgcatttacaaccacaatgaatggtggtgaacgttcaatggtgccaattggtaactatgagcgtgttatgccattagacattatggcaacacatttgttacgtgatttgattgtcggtgatactgacagtgctcaagcattaggttgtttggaattggacgaagaagatttgggactatgcacttatgtttgtccaagcaaatatgagtatggcccagcactgcgccaagtattgaccaaaattgagcaggaagggtaactcatggggttgaaaaatttatttgaaaaagtagagcaccattttgagcccggtggtaaatacgccaagtggtatgtactctatgaagcggtcacaacggttttttatacgccgggtacggtgacacgtaatggttcgcatgtacgcgataccatcgatctaaaacgtatgatgatccttgtttggttatctgttttcccagccatgttctggggaatgtataacgttggtcaacaagcgatccctgctcttaatcagttgtatagtggtgctgagttacagcaagtgattgcttctgattggcactatgcacttgcacagtatttaggtgcatcattgacaccagatgctgggtggggaagtaaaatgctccttggggcaacttactttttacctatctatcttgttgtatttgcggtaggtggtttctgggaagtgttattttcccttattcgcggacatgaaattaacgaaggtttctttgttacttctattctgtttgcgttaattgtgccacccacattaccattatggcaggctgctttaggtatcacctttggtgtcgtaattgcaaaagagatttttggtggaacaggacgtaacttcttaaaccccgcattagcagggcgtgctttcctcttttttgcttatccggcacaaatttcaggtgatcttgtttggactgccgctgatggtttctctggtgcaacccctctctctcaatggtctgtttctggtcaaagtgcattgttaaataatgtcactcagcagcctatttcttggatggatgcattccttggaaatatccctggttctattggtgaagtctcaacactgatgatcctaattggcggcgcaatcattttatttgctcgtatcgcatcatggcgcattgttgccggtgtgatggtgggtatgattgcaatgtcatatctgtttaacttgattggttctgactctaatccattattctcaatgccttggcactggcacctcgtattaggtggctttgcatttggtatgatgtttatggcaaccgatccggtatcagcttcattcactgataaaggcaaatgggcttacggtattttaattggcgtaatggctgtgctaatccgtgtcgtcaatccggcttacccagaaggaatgatgctagcaatcttattcgccaacttatttgcaccgctgtttgactatgtggttgttcaggcgaatattaagcggagaaaagctcgtggctaaagaaaaaaacaaagatagcgtcggaagaacgttcctcgttgtatttattctatgtcttgtttgttccgtggtagtggctggctctgctgttggacttaaatctaagcaagaagagcaaaagctactggataaacaacgtaatattctagatgttgctggtttattggtgcctaaaatgagcgccagtgaagtactcaaagtttacgatacacgcattaaagctaagattgtaaacttcaaaactggcgaattgacagacagtaaaggcgactttgatttaaatagcgaactacgtagcgatgaaacctctatcgcactatcacctgaagaagatattgcaaaaattcgtcgtcgtgccaataccgcagaagtttactttgttcttgatgatcaaggtaaaacccaagaagtggtactgcccgtctatggttcaggcctatggtcggtcatgtatgcctttgttgcggtagatattgatggtgtaacagcgaaggggattacctattattctcatggtgaaacgccggggctaggtggagaagttgataatccgcaatggaaggcacagtggaaaggtaaacgcttactgaatgaagaaggtgtgcctgctattaaaatcgtacgtggcggggcatcagatagtccttatggtattgatggcctttcaggtgcaaccttaacctctaacggcgttcaacatatgttcgatttttggttaggtgataaaggtttcggcccattcctgaaaaaagttcgtgaaggagagatcaatggctgatacaaaagagatcaaacgcgttttactcgggccgttgttagataataacccgattgccttacaggtattaggggtctgttctgcattagcagtaacaaccaagcttgagacggcactagtaatgaccattgcggtaacattagtgacggcattctcaaacttctttatttcactgatccgcaactatatccccggcagtgtacgtattattgtgcaaatggcgatcattgcttcattagtaattgtggtagaccaagttttacaagcgtacgcttatgaaatatctaaacagctttctgttttcgttggtcttatcattactaactgtatcgtgatgggacgcgctgaagcctatgcgatgaagtcaccacctatcgaaagctttatggatggtatcggtaatggcctaggatatggggttatcttgatccttgttggatttttacgtgagctatttggttcaggtaaattatttggcattacggtgatggaatctatccaaaacggcggttggtatcaacctaatggcttattcctattagcgccaagtgctttctttattattggcttgctaatttggggattacgtacattaaaacctgcacaggttgaagaggactaattgccatggaacattatataagcttatttgttcgtgctgtttttattgaaaatatggcactggcgttcttcttagggatgtgtactttccttgcggtatctaaaaatgtaaaaacagcatttggattaggtattgcggtaaccgttgttctgggtctttctgtacctttgaataacttggtttacaactatgtactacgcgcaaatgcattaatggaaggtgttgatttaagtttcttaaactttatcactttcattggtgtgattgcggctctggtacagatcctcgagatgattttagatcgctacttcccttcgctatataacgcattggggatcttcttgccactgatcactgttaactgcgctatttttggtggtgtgtcctttatggcacaacgtgactataactttagtgaatctattgtatatggtttcggctctggaattggctggatgttagctatcgtattactggcttctattcgcgaaaaaatgaaatacgcggatgtaccgtcaggtatgaagggattaggagttacttttgtcaccacagggttgatggcattaggtttcatgtccttctctggtgttcagctataaagggtgagaagaactcatggatataattattctaggtgttgcgatgtttaccctgattgtattggtgctaactgcattgattttgtttgcaaaatcaaagttagtcaatacaggggatattgaagttgaggtgaatggagatcctgaaaaaagtttccatgcgccagccggtgataaattactcaacgtattatcaaacgaaggtatttttatctcatctgcatgtggtggtggtggctcttgtggtcaatgccgcgtaaaagtacttgaaggtggtggagatattcttcctactgagctttctcatattaataagcgtgaagctaaagaaggttgccgtttagcttgtcaggttaacgttaaaaataatctgaaattagagctacccgaagagatcttcgggattaaaaaatgggaatgtgaagttatctcaaatgataacaaagccacgtttattaaagagttggtattaaaaattcctgaaggtgaagtggtacctttccgtgctgggggctttattcagattgaatgtcctcctcacactgtgcgctatgaagattttgatgttcctgaagagtatcgtgaggattgggataaatttaatttattccgctatgtttctgaagttaaagagaccacagtgcgtgcatactccatggcgaactacccagaagagcatggcattatcatgttaaacgtgcgtattgcgacaccgccaccacgtaatcctgatgtgccaccgggaattatgtcatcttatatttggtcattaaaaccgggtgataaagtgacaatttcagggccgtttggtgaattcttcgcaaaagaaactgatgcggaaatgatcttcattggtggtggtgctggtatggcaccgatgcgttcacatatttttgatcagctaaaacgcttacattcgaaacgtaaaattagcttctggtatggtgctcgttctgtgcgtgaaatgttctatacagaagattttgatatgctggctaaagagaatgaaaactttacttggcatgttgcgctgtcagatgcattaccggaagataattggacgggttacaccggctttattcacaatgtgctctatgaaaactaccttaaagatcatccagcaccagaagattgtgaattctatatgtgtggaccaccagtgatgaatgctgcggtgatcaaaatgcttaaagatttaggcgtagaagatgaaaatattatgctggatgactttggtggttgatttttcacataaagtagataaagcataacagtatgaaatgacaagcgcccactaatgtgggcgctcatgatcagaagagagatatatgttaaaaagaaagatgatgcatgggatcttgatgctatgtgcactggttttcttatcagcctgtggtgaaaaacagcaggtgttagaaggcgaaacgatgggaacttactattcaattaaatatgttcctagtagtgattcaccttcacaaagcgtcttacaaacagaaatcgatcgtattcttgaagaagtgaacgatcaaatgtcaacgtatcgtcctcaatctgaattaagtcgtttcaatcaaagtcgtgaaattaatacgccattcccagtttcacccgctactgctaaagtcgttagtgaagcgattcgtattaataaaattacggatggggctttagatgttactgttgggcctttagtcaatttatgggggtttggccctgaaggacgttttactcatcaaccttcagccgatgaactagctaaacgtaaaaaatggacgggaattgattaccttgcagtggaaggtaatacattaattaaaaaaatacctgagctttatgttgatctctcttctattgctaaaggttacggtgttgatgctgttgccgaatatttgatttctcaaaatattaccaactatatggttgatattggtggtgaggtgagaacacaaggtgttaatggtaatgataaaccttggcgcattgcgattgaaaaacctgctaatgatggcaccacacagagtgtacaattaattattgaaccgggtgataattcgattgcgacatcgggggattatcgtaactattttgaagaagatggcgtccgtttttctcatacgattgatcctacaacaggtcgcccaatcaaacataaccttgcctctattaccgtaattgtacctacttgtatgagtgctgatggtttatcaacagggttaaatgttctggggcctgaaaagggcttagaggtagcaaataaattaaatattcctgtttttatgatagttaaaactgaaaatgggtttgaagagcgttatagtaaggcattcgccccattcttgaaaaagtagaatttaaggagagaaggttatgttaaaaatatttctttttgccttcatcttgttcttactggcattctttggaatggctttaggatatattgttaaacgtaaaagtattcagggcagttgtggtggtttaggctctattggtattgagaaagagtgtgattgtcctgaaccttgtgatgctcgtaaaaaaagaatggcgaaagaagctgctcgccaagagctattgcaaaaaaaccgcatcttatagtttggttatcgatgcatttttttgctaacgatagatttatcaagtaatagctaaaataaaagagtgacgtatattttatacgccactcttttttgtttagaaaaatcgctttcagataaggatattaagctttttaatactgtgattaagtcgctgctacttccaaggataagggttactgccttcccactctaatacttctttttttgcctcatcataagaatagccataatgctcttggagtttccctatcagttgctctctggttccttcaataatatccagttcatcatgggtgagttttccccatttttctttcacttttcctttaaataaattccagtcaccagaagctttattatttaacatcttattccacctaacttatttctgtttattgacactattaagtgtagaagagaaatgtattaaggtaaaaaagcgccaatgtcgcaacgatgtttactcttttctgaatgcttttattttagctggagaatcaaccataactgcatcagcacctaattctactgcttgcaaataatctttctcagtattgataccgaataaaacgatatgcgcattaccccccgcacgaaaacaagacatcgcatctttgtcccaacttaatacagccgctgaacgagcttcacctaaggtatatttttcaaccacctcaacttttctgtgcagttcaaggccataccaacgtgtgatatcaagattttctggcagtaaacagatatgtcccatagtaatattggctaagatatcgcgggtaacatcacgactttcaaagcgttgtacgttatcaggtaacgcatctaaaaaagcactattggtagaataaacacgcgttctctctaacgcattatgtttgcttaataccgaagctaatgctttgccttgtataacgggatcggcatcaggtgattttaagtcaatatagaattgtgttttaggaaattgagtcagaatatactccaatgtcgggatagtaactcctttattgcgatatggaaattgttgtgcttccccatatttatatcctgcatcccattgcgccaattctttggcagtaaaggttgaaattgccccttgcccattagtgaggctttttagatcacttggacgataaagaacagggacattatctttagacagttgaacggttatccaaattgcatcagcttgattgcttagtgctgttttgatagcaatttcggtattttcaggtgcatccgctgtgccacctctgtgtgcaataattttaggagaagtcataacaaatactgagtaaaagaggaatgaaattgcaataaatattttgatcatataactctatttccttgttttatatttgattttcaaataattacgataaaaataaaaagagcagaataagttaaaagtaatctatcattactgtgtgacatttctataaacaaacgtacttaattaaaataataatcactaatatcacttaaaataggtatagatcagggaataaaaattgtagttaatggttatttactgtatatttaaacagtaaatagcgtgaggtgattgtatgcggaaaattattcatgtcgatatggattgtttctatgctgcgattgaaatgagagataaccctacattaaaagagatccctattgcagtcggtggtaatgcttctcgtcgaggtgttatctgtactgctaattatcctgctcgccgttttggtgtccgtagtgccatgtcaacggctacggcattaaaattatgccctcatttaaaagtattgcccggtcgcatggcattatataaagagacttcagctaaaattcgtcaaatatttgcccgttatacagatttaatagagccgctttcattagatgaagcttatcttgatgtctctgatagcaaacactgtcacggctctgccacattgatagcgcaacagatccgccagcaaatttttgctgaacttaacctcacggcttccgccggtattgcgccgattaagtttctcgccaaaatagcatctgatttaaataaaccgaatggacaatatgtgatcacccctgaacagatggatgactttattttaaaattaccattaaataaaattccgggagtaggaaaagtcacctttgctcgattacaagagatgggattagaaacctgtgctgatgttcgtggtacggatgttatttccttagtgagaaatctaggtaaatttgggcaaagcttatgggagcgtagccatggtattgatgagcgattaatcaatcctgaacgtttaagaaaatctgttggtgttgagcgcacactggctgaagatattgattcatgggatgagtgtttagcattgcttgatggattatatgatgaattagaaaaacgattaagccgagtgaaacctgatcttagaattgcgagacaaggggttaaattaaaatttgatgattttcagttaaccacccaagagcattctcatcctattttagaaaaaacggatttaattgatattgcttatcaggcatggcatgaacgtcgaaatggcaggggagtaagattagtcggttttcatgtcacgttgcaagatccacaaatggaacgacaacttcttttagcattataagtattaaaaaaccatagcgagcatcaaggcgcactatggttaatgtatttaaatatactttttaattaatagatgatcaccagcggtaatttatcgttgctgtcatggttctgccaatgccataaaaacaggcagtttcacccgcacaagaggcaacatagtgtttgttggcaatattattcatatttagttgaacttcagccccttttaaagaggaggataactcgcctaaagaataacctaccatggcatcatacaaagtgactgcaggtacactaatcgtatttttagtgtcaccttgagatacaccgatatatctcacaccaaagcccgctttagcaccattaaatagccctgatgtttcatcatactgcccccaaaatgatgccatatgtttaggaacccgtggtaattcttttccttgtgtacctgcggtgatggtttttctcacttcagtatcggtataagcatagctactaataaatgatatattttcagttaattggctattaatttgcgcttcaataccacggcttctaatttcacctactggctcaaaataggctttttcagcgttatagttagtcacattacgttgttgtaattggtaaatagagagtgttgctaatgtctgttcatttggggtgaggtattttattcctacttctaattgacgtccttcacttggctcaaatggtgcactacccggagctcttcgtgtctgtaaattaggttcaaaagaggtgctataactaatataaggtgaaataccattatcaaaggcatagagtagacccactcgaccggttagcttctggtcgtcttgttggtctttgctgcttttgatgtgatcataggtacgaacttgcgcccaatcttggcgtaatccccctaataagatccagtttttccattggatctgatcttgcaaatagatccctaactggtcgtgtttttgtaattgatttgtcaccggtttttgtaaactgatatcaataggataatgataattaggatttcgccaatccagatcatattctgggcccatcgcttgcaataaattgtctttatttttactccattgataatcaatacctataattactgtatgcgctaatttttcagtatcaaaatcagcttgtagtcgagtatcaataccaaatgtatctgtttctcgtttttcctgttgagctcggcgttcaagaatataagggttatcttttcttaatgaaccaaaaacaagatatttatatttttgtttgatatggctataacgggcattttggatcaattttaatctatcattaaattcatgttcaaattcataaccaacgccatattgttgacgccatgattggtgataatcagcattatttacattgaaatcaaatggaatggtgccttcgggtgttgttttgaccgtaccataagctggcaaaaaattacggtatcccgcttcgggctcttgttgaataaaacttaataacgttaaacgtgtctgctcatttggcaaaaaagtgatggcaggggcaagggcaaatcgttcttctttatagtctttaatttgagtttgttgtgtttttgctaatccattaaggcgatagagaatacgattatcatcacttaatgagcctgcaaaatcaaaagctgtctctgctaatttatcatttcctacacgtgcttgaatatgattaatggttgttgaagtgggtcttttgctggtcattgccacaagaccacctggatttaattgaccatatagaacagaagacgggccacggatcagctcaactctctctaatagccaagggtcaatagctcctgtagaagatgaggctcccataccataactaagtccatcaagaaagcgaggggcatagctatacccacgaataaagatttcatcatttcggtttgaactgccgcgatattcagtgaaaacgccaggtgtataccgcaatgcttgagagacagaactgacatcttgcgcatccatctggtcacgtgtaatgacactgattgattgtggtgtcttatctatatcactaagtattttatttgttgatagtgtttttgttgccactaaacctgaaattggtccttgcggatcttgtgagggggatgcggtaacaatgattttatcaggtgaattttgtgtcattgcggcatgaatttgtaacgataacagactgaaggggagagtaagtaataggttggtagcaataatttttttagacactgttgatccctttaaatttttaatttttctttacctaaaatgcggtaatggtgaaaataccattatgtaaatattaatactaatgataattattattattctataaattatttttattagtattaattttttattacaaaatagtataagaattggcttttataaggtgggttgggaataagttatagggagataaaataacaaaaaacccgcctattaagcgggtttgataactgtttttaagtagaattatttagccgggatcgcttttaaaatagctgtcagtaactgccagtattggcctacactcttaatgtgtactcgctcatccggtgagtgtgcaccgcgaatagttggcccaatagagaccatatccatatctggataaggttttttaaatagaccgcactcaagacctgcatggatcaccataatatttggcactttatcaaatagttgttgataagtgtcgcgtactaagtgcataaccggtgaatccgcatcaggtttccagccaggataaccacctttggtttcgatatctgcttgagcaagtttggctaatgctgtcagcatgctaacaacataagttttaccgctatcaatcagagagcgaattaaacataggatttctactttatcgtcaacaatactcactacaccgacgtttaatgaggtttcaaccacaccttccacatcatcactcatgcgaataacaccatttggcatggcattaagtaaattgatagtgcgagattgacaatcagcagtaaatactggtttttcggtgctagtatctgttaattcgatagctagatttttttcagcaatggctaattcactttttaatagcgcttcaaattctgtggtaatgctatttaattgagtcgctttatccgcaggaatagcaaaaataatatgcgcttcacgagggatagcattacgcagtgtaccaccatggaaatcaattaattttagtgctaattcatccgcatgttcagcaaggaaacgcgctaataatttgtttgcattacctaaacctaaatgaatatcaccacctgagtggccgccatttaggccttttagtaccagttttttgacgatatggtttgcaggaatagcttcataagtgaggtctaccgtggttttaacatcaataccaccggcacaacccatatagatttcgccttcttcttctgagtctgtattaatcagaatatctgcttgtaaccaaccaggctgtagtccaaaagcaccatccattccagtttcttctgtcatggttaacaatacttctaaggggccatgtttaacagtatcgtcagctaatacagcgagtgcagaagccataccaacaccattatctgcacctaatgtggtgcctttcgcttttacccattcaccatcaatataaggttggataggatctttggtaaagtcgtgttcggtatcgttatttttttgtggcaccatatctaagtgcgcttgtaaaacgactgttttacgatcttccatacctttggtggcaggtttacggattaaaatatttcctaccgcatcgcgctcaacagataaacctttttctgtcgcccaagccataatgtgggacgctaaggcttcttcatggtatgaagggtgtggaattgaacaaatttttgcaaaaatatcccataatggttgtggggatagagtagatagttcagacacgatggatctcctctaacagcatctgtgttatgaatagcctaccgctttcttaagggttagctttattattctgagcgttattcgccaaatataattgagaatatcactttcttttgatgaatgcgtcattctcttacgtatctatctaataatttggatttctgtgttggtgttcgcttttttattgcgtgttttttagacaaaaaaaatacatatcaggaaaaatgaggattatctcgaccatttttatgttttctctggtttttgaacgctcaaatcactataatctcgcgcaacctttttttccgcaaaaaagcttctctcgaatttcaagtagctaggatcacaatattatgagcgaaaaatatgttgtaacgtgggatatgttgcaaatacatgcccgtcaattggcacaacgtttgttaccagtcgaacaatggacaggcattattgccgtcagtcgtggtggattagttcctgccgcattacttgctcgtgaattgggtatccgccatgtggatactgtctgtatttctagctatgatcatgaccatcaacgtgacctcaaaatcttaaaaaaagcagaaggtgatggtgaaggttttatcgttgttgacgatttagttgatacaggtggcaccgcaaaagttatccgtgaaatgtatccgaaagcacattttgtcactatctttgctaagccagaagggcgtccgttagttgatgattttgtggtcgatattccacaaaatacctggattgaacaaccttgggatatgggcgttatgtttgttccccctgtttgtgataaaaaataatttatcttaatcaattaattcaaatatattgataaaatcctcgtttattgaactgaccccagttcctatgcgaggattttttatatcggctttatttttgatgaccttacgcttttcctatctcttcgtgctgatgttgatctgctattccactgtagaagtgaaatccatgttatgatatgagcagaattttgagcctcattatacgatacacactgatttgaagagtgatatggcaaataatacaaatctttctgaaacgttatttaaacctcgtgctaaacatgcggaaacctcaacgttaatacagtacacacaccctaaatctaatattgattcgtactctgtacttaatgggatgagccagcaaaattggtatcgcacaattcaacgtctacagtggatctggcgaggtatttcccccatagagatcgaagaagtattaagtcgcattgctatttttgatgcgccacgcagtgatgataaatttattgatacagtcgttggttatcgacgtggcaactggtcatttgaatggtctcatcaagcaatgatttggcaacaaaaagcgttacgagagacctcagaggaagcagccgctgattgttggttacgagcggcaaacctttatagcattgctgcttatccatttattaatggcgattttcttgctgatcaagcggtagtattggcgatgaaagcttttgaaaatgccatgaaattctcttcatttgaagtaaaaaaactgacgtttaaattaacaggtaaaggaactaccagtggatttttacatctacctaaagggtgtaaaggaccttatccaacagtcattttttgtggtgggttagatagtttacaaagtgattatgttaacttttttaggcgctacttatcaccaaaaggtatcgcgatgttaaccgtagatatgccatctattggttattctgttaagcagaaactcagcgaaaatacctgtcaattgcatggtgatattttacagcagttgggagatattccatggattgatcacactcgagtgggcgtaatgggatttcggtttggtgccaatattgcggtgcgtttagcctatctttatccaaaattgattaaaggtgttgtggcattagggccattaattcatgccttttttactcaagcggaattacagaagaaaatccccattatgtatctcgatgtactggcgagccgcttaggattattaaatatagatgaaaacaatctcagactatcgttaagtagttattcactgaaaaaccaagggttgattggtcgtcgtatgccagtgccgatgatgagtgtttattggaaaggggatgaaattagtcctaaagaggattcgcagctcattgctcgctcttctatggatggcgatatagtagaaataaaagaaaaaccactttataaagggcttgaacaggcattaactaaaagcgcagattggatctatgctaaattaatataaataatttcaaacaataacttgctaattataatagattatataacagtagaggtgataaggagactgaatttatgacttcatctttgcaccctacccgaggtaagttattaaaacgttttgctcaaataggaccttatatccgtgagcaacaatgccaagaaagccagtttttttttgattgtttagctgtttgtgtaaataagaaagtcacaccagaaaaacgagagttttggggctggtggatggaacttgaacgtaatggtgaacagttaatttattattaccaagttggcctattcgataaaaatggcgattgggttaatcaagtaataagtaaaaaagatgtgattgaatcaatacatgaaacacttattcgttttcatgattttctacaagcggcggtaagtgaattagagatgacgctagttccagatgaaaaaatgagcaattttcctcttccccttaagccctaattttgtgttagggcaacttttcatagattttgcgttatgtcagttggcataacgcttctctcctgataaaacagtgtatgatcttttaaatcaacaaaaaatggtaaatgttatgagtagcagccaaacgctggttgttaaattagggacaagtgtactgactggtggttcacgacgtctggatcagtctcatattgtagagctggttcgccaatgtgcaaaacaacacgaaaaagggcaccggataattattgtcacgtcgggagcaatagcggcagggcgtgaatatttaaactaccccgatttgcccgcaacaatagcatctaaacaactgttagccgctgtggggcaaagtgctttaattcaggtatggaagcagctatttgctatttatggtattcatattgggcaaatgttattaactcgcgcggatatagaagatagagaacgttttttgaatgcgcgtgatacactgcatgcattattagataacaagattattcctgttatcaatgaaaacgatgccgttgctactgcagaaataaaagtaggggataacgacaatctttcggcattagctgccattttaggtggcgctgataaactcctgttacttactgatatcgaaggtctatatacggccgatcctcgtagcaatccggatgcgaagcttattcctgaagtttttgatatcaacgatgaattacgtcaaatggccggtgatagtgtctctggtttaggtactggaggtatggcaactaagttacaagcggccactgttgcagggcgtgctggtattgacgttgttattgccgccggtgttaagcctgatgttatcagtaaagttattgataatgaacctgtcggaacactctttcatggtttaaaaagcccccttgaaacgcgtaaacgatggatttttggtgctccagtcgcaggggttatcattgttgataatggggctgaaaaggcgattaaagagcaggggagttctcttttacctaaaggtattaaagaaattaaaggtgacttttctcgagggtgtgttatccgcattcaaagtttgcaaggaaaagatcttgctcatggtgtcgcgcattataatagtgatgcgctacgcttaattgcggggcaccattcgcaagagattagtcaaattttaggttatgagtatggcagtgttgcggttcaccgtgatgatatgattgtgagctagggagtataaatatgttagaacaaatgggaaaagcggcgcgagaagcttcttggcacttagctcagctatcaaccgaacaaaaaaatcaggcactgttagtcatcgctgatttattagagcagcaagaagccattattcttgctgctaatgaaaaagatatggtggcggcacgagagtctaatattaatgctgcaatgcttgatcgtttattactcacatcagaacgtttaaaagcgatcgctgatgatgttcgccaagtttgtcatctagaagatcctgtaggtcaagtgatagatggtcgtttattagacagtggcttacgtttagaacgccgccgagtccctttaggggttgttggcgttatttacgaagctcgtccaaatgtgactatagatgtagcatctttatgcttaaaaacagggaatgcggctattctccgtggcggaaaagagactcaccatactaaccaagccgttgtcgcggtgatccagcaagcactagaaacatgcgctattcctgcggctgctattcaagctatcgataagccagatcgtgaattagtcgcaaaaatgctaaaaatggatgagtatattgatatgcttattcctcgaggtggtgcaggattacataagttatgtcgtgaacaatccactattcctgtgatcacgggggggattggtgtttgtcacacctttgttgacgaaagtgctgatttagaccaagcattaaatgttattattaatgctaaagtacagcgtccaagcgcatgtaattcgttagaaacgttattggtacatgaagctattgcggagagtttcttacctcaattaagtgatgcgatggcagcacaaaaggttactttgcatgccagtcaacgcgctataactgcattgaaaaagggacgtgcgacggtcgtcgatgtgactgaagcagattattgtgatgaatggttatcactggatctgaatgttgaagtcgttaatgatttaacagcggcaattgctcatattcgccaatatggtaccgcgcactcagatgctattttaacgcaatctatcagccatgctgatcgctttgtacgccaagttgattctgctgcggtatatgtgaatgctagtacacgttttacagatggtggacagtttggcttaggtgctgaagtagcggtgagtacacaaaagctacatgcacgaggccctatgggattagatgctctaaccacctataaatggattggttacggcgacaatacattacgtcgctaataatcccttaaatagctaagccatactttcataaagtgtggctttatttttttgtattgtgaggtatgatacttaatactttacacattgtaaattttagattacacccatttagcgggttaacacagcggagagagtgcatttatggaaagtacaatttaccttataggacctagaggtgcaggaaaaacaacagtaggtaaagcgctttctctatctttagattatcaatttattgatacagataattggataacagataaatatcaacaaactatttcttctatggttgaagcggaaggttgggatgtatttcgccaacttgaatcagatgcgcttattcaagttagccaacctaaccaagttatttcaacggggggagggatagtgttggcagaaaaaaatcgtgtttatatgaaaaattcaggtgtaattgtttatttacaagcttcacttgaaactttagttgagcgtttatctcaagatcctaatgaggcacaaagacctagcttgacgggaaaaacattagtttcagaaatacatgatgttttaattaagcgtgagcctttatatatgcaatgcgcagatattattgttgatgctggattatctattaatgatattattgaggtcattctcgcaaaactcgctaaataattaggaagttgtcctatataaagacgaaaacaaaagacaactattttattttcatcatatcctatttatagtaaggctaattatagcaaaatgagatatggatatgatgttgatagcgttttttaaaacactatttaaattcttatttcgagtaagaattgaaggactaattaatcagttttcacaatatgaaaaatgcattattacgccaaatcatacatcgtttattgatggtatattattgcgtttatttttaccgattaaccctgtctttgctgtttacacctcagtggctaatgccaaacataccaaatggctcagtcgttatgcggatattgttcctttagatcccgctaatccaatggcggttcgccaattagttaaagaagtcgataaaggccgtcctgttgttattttccctgaagggagaattacggtaactattggtttgatgaagatttatgaaggtgctgcgtttattgctgctaaatcaggggcaaaagttatccctgttagaatagaaggtgctgaatttagctacttttctcgagtgcataaaacgttaaatataaaagcaaagctctttcctaaaatcacaataaaagtgctacctgcggttgatttacctatgcctacagcggaaaaatcagcagagcgccgtcgcttatcgggagaaaagctccgtgatattatgatggatgctattatgcaagcacgtcctaatatcacgctctatgaggcatttttacaaggaatgtctcagtttggtcgtttcagtcctcttatttcagatattaatatgaaagaggatagttatcagggcctattgaaaaaaatattaggtgttagtcgtattattgaacgctataccgaacctaatgaacgaattggccttttacttcctaatactaccgttacggttgcggctttatttggggcaacgatgcgccaacgggttgtggcgatgcttaactatactgcgggtagcttaggtgtacaaaatgccatgaaagcggcatccattaaaacgatttttacctcacgccaatttttagagaaaggaaatttattacatattccagaacagactccggatgcaaactgggtttatcttgaagatctcaaagatagcattactagagaagataaacgctggattgcacagcacttactcactcctcataaagcgatgttagcgcaaaaatcgacggatgcagcagttatcttatttacttctggatctgaaggcactccgaaaggtgtcgttcatagccactccagtttattggcgaatgtagagcaaattcgcgctattgctgacttttcacccagagataaatttatggctgcattaccgttattccatgctttcggtttaacggtaagtgtattagcacctatctgcttaggggcacgagtattcctctacccaagcccactacattatcgtgtagtacctgaattagtgtatgaccaaaattgtatagtattatttggtacttcaactttcttaggtaattatggcaaatttgctcatccttatgattttgctcgactaagatatgtggttgcaggggcggaaaaactgtccgaatcgacacgagtattatggcaggataaatttggtattcgtattttagaaggttatggggtcactgaatgtgctcctgttgtctccattaatgtaccaatgagtgctaagccatataccgtggggcgtttattaccaggcatggaagggcgtttaattcccataagcggcattacggatggtggaagattacaactgcgtggtcctaatatcatgcttggctatttgcgcgttgagtccccttataaattagaacagcctacagcaataaatgccgaaggcatcgaagaagtgggttggtatgatacgggagatatcgttgctattgatagcgaaggtttttgcactattaaagggcgtgtaaaacgttttgcaaaaatagcgggagaaatggtttctcttgaaagtgtagagcaattagcggctaaagcctcggaaggcaaccatgctgtggtggcggtaaatgatccacgtcgaggtgagtcattagtgctttttacaaccgataagcaacttgatcgcagtatgttatcggcattagctaaatccactggtgtggcagaaattgcggtaccaaaagatattcgttttctcaaagaaattcctgttttaggaagtggcaaaacggattttgtctcgttaaagcaactcgctgaacaggaaaataattaatgtcagagaatataagtcagcccccattactgagtaagggcatgaaagcagtattattatcacagtttctttctgcatttgcggataatgctttgttatttgccatactcgctcaatttaaatcagcactttatccagaatggagccagcctattttacaaatggtgtttgtgctggcttatattctcttagctccctttgttggacaaattgccgatcgccagcctaaaggtagggtgatgcttactggtaatgcgttaaaatttgccggtgcttttcttatttgtattggaaccgatccattcttaggttacgccttagtggggatcggcgccgccatttattcgcctgctaaatatggtattttaggtgagttaactgatggcgagcgtttagtcaaagcaaatggcttaatggaagcatcaactattgcggcaattttattaggctctgtgattggtgggcttctttccgattggagcattatcttagcattagctgtctgtgcgataatgtatgctttagctgtattggttaattttagcattcccaagttatcacctgctcaaataggtcgaggctggaatattaaaaaaatattcaatcaattcttagctgcttgtggctctttatggcgagataaagagagccgtttttctctggtaggaacaagtatgttttggggggccggcgtcacattgcgttttctattagtgcaatgggtgcctatagctttgggaatgactgataatacaacaccaacaatattaaatgcgatggtggcgattggtattgtgattggcgctggtttagccgctaagtttgtcacattaaaaacggtccgtcgttgtatgcctgccggggttttaattggcttaggtgttgtttacttctcattacaaaccaccattattccagcctattttatcttagttgttattggcatttttggtggcttctttgttgtaccattaaatgctttgctacaagataaaggaaagcatagtgtgggagcggggaatgccattgctgtacaaaatttaggtgagaataccgcaatgttactgatgctaggtttgttctcgctagtcaccagtatgggtatttccgttattacaattggtattggctttggtgctatctttgcgctagcaattggtggattatggttgtgggattgcacaagaaagagagctgaataacgttaattgagagtcgaggtgaaacaaccttcatgataaataatgatgaaatgacccatctgagcattgaagtcggtcaggctctgctaaaacgaaaaaaaacgttaactactgcagaatcatgtactggaggatggattgcaaaagtcattactgatatagcaggtagctcagattattatcatcgaggttttgtgacttacagtaatcaagctaaacatgacatgattggtgtagatgagcaaacattgtctgattttggtgccgtgagtgaacaagttgtctgtgagatggcaaaaggggcattgctaacagcaaatgcagactatgctgtatcggttagtggtattgcaggtcccggcggcggtagtgaagagaagcccgttggtttagtttggtttggctttgcaataaaaaccccagaggggcttcgagtggttgctaaacactgtatttttagtggatcacgagaggaggtgagagcccaatctgtgattttctctttaaaatcaattcttaaagaaattattaataattaacttgatactgtatgattatacagtataatgagtttcaacaagcaaaatcatatacgttttaatggtagtgacccatctttatgcttcactgcccagagggagataacatggctattgatgaaaacaaacaaaaagcattggccgcagcacttggtcaaattgaaaagcaatttggtaaaggttctatcatgcgtctgggcgaagaccgttccatgaacgtagaaactatctctacaggatctttatcattagacgttgctttaggtgcaggtggattgccacgtggccgtattgttgaaatctatggccctgaatcttctggtaaaacaaccttgactctacaagttattgcctctgctcagcgtgaaggaaaaatttgtgcatttattgatgctgaacatgcattagacccaatttatgctcaaaagctaggtgtcgatatcgataatctactctgctctcaacctgacacaggtgaacaagcactggaaatttgtgatgcattatctcgctctggtgcggtcgatgttattgtcgtggactccgtggcagcattaacaccaaaagctgaaattgaaggtgaaattggtgattcacacgttggtttagccgcacgtatgatgagccaagctatgcgtaaactagcgggtaaccttaaaaactctaacacactactgattttcattaaccaaattcgtatgaaaatcggtgttatgtttggtaacccagaaaccacgaccggtggtaatgcgcttaaattctatgcttctgttcgtttagacattcgtcgcattggctctgtcaaaaatggtgatgaagtcattggtagtgagactcgcgttaaagttgttaaaaataaagtggctgcaccgtttaaacaagctgaattccaaattatgtacggtgaaggtattaatacctatggcgaactgattgatttaggtgttaaacataagttagtagagaaagcgggtgcttggtatagctacaatggcgaaaaaatcggtcaaggtaaagctaacgcaaccaattacttaaaagaacaccctgaaatgtacaatgagttaaacactaaattgcgtgaaatgttgttaaatcatgctggtgaattcacaagtgctgcggattttgcaggtgaagagtcagacagtgatgctgacgacacaaaagagtaattagctggttgtcatgctgtttgtgtgaaaatagaccttaaatcattggctattttcacgacagcatcccattgaataacttgtctgtataaaatttggtcagatatcaaaggaagccttaaaaaagcttcctttttgttttatgtaaaaattaaccactcagtggtagtgaaaaattagtttatttttcactgtttttctttttttttgcaatttattactattttatcagcaataacaatatttttatctttggggggattacactatgtaagtgtttatatagtgaagatttggtgatgtattctattggttatttataacatcatatttcttttacatgtttgaaaaaacagcattaaaataacttgttagcatctatctatatagataatcaatctctttgactacgagagaaatggatttttgctactttattattttaaatttatcagtaaatatatttagttaaatgattctggcgggatttttattcagaaaaattaaatatgtaatgggaatattggctttttttgataatacagatttaggatagctgttgcgagcaaatgagcaaaatgctattgataataaactaaaaatgacgaaaaaattatttaatagttttattatgaaattatcgtcattaccttctcatatcttacaaaattcgcctcgatttggttaaaacgacctatcttgaagtatgttgctactttcagaaaactactagacgatttacaatgtcaactcgaataagtttatcgggggttttacttctgagcgaagaaattctatcttatccctacttatgtattcgttggctaagtagaggtaaaactaaacctcctctaactagatttctaatttctgtttttccagcttgatttcgggataattatgagcaaaagcaccgctgagatccgtcaggcgtttctcgacttttttcatactaaaggacatcaaatagtaccaagcagttctttggttccaaataatgatccaacattgctgtttacaaacgcagggatgaaccaatttaaagatgtatttcttggattggacaaccgaccttattcccgagcgacaaccgcgcaacgttgtgtgcgcgcgggtggtaaacataatgatttagaaaatgtgggttatacagcacgtcaccatacattttttgaaatgttaggtaactttagttttggtgactatttcaaacatgatgcaattaactttgcctgggaattattaactggcaaagagtggtttaacttacctaaagagagactttgggtaaccgtttatgccactgatgatgaagcttatgatatctggaataaagaagttggtgttccagctgagcgcattattcgtattggtgataataaaggcgcaccatttgcttcagataacttctggcaaatgggagatacggggccttgtggtccatgtactgagatattttacgatcatggtgatcatatttgggggggaccgccagggacacctgaagaagacggtgatcgctatattgagatctggaatatcgtctttatgcagttcaaccgtaaatcagatggtacaatggatccattgccgaagccttctgttgatacgggaatgggattagagcgtattactgctgtactacagcatgttaactctaactatgatattgatttattccgcgcactcattaaatccgttgctgaagtgactaatgcgacagacttagcaaataaatcattacgtgtgattgccgaccatatccgttcttgttctttccttgtttgtgatggtgtcattccttctaatgaaggtcgaggctatgtgctacgtcgtattatccgtcgtgctgtacgccatggttatatgttaggtgcgaaagatactttcttctataaactcgttgcaccgcttattgatgtaatggctgaagccggtaaagaacttaagaatcaacaagaaatcgttgaaaaagtacttaaaacggaagaagagcagtttgcacgtactttagagcgcggtttacaattattagatgaagagctagaaaaattaaccggtgatactttagcgggtgaaacggctttccgtctttatgatacatatggtttcccattagatttaactgcggatgtttgccgtgaaagaaatatcaaagttgatgaagaaggctttgaactggcaatggaagagcaacgtaaacgtgctcgtgaatctagcggttttggtactgactataacgaactgattaaagtcgatagtcgcagtgatttctcaggttatgaccataatgagcaacaaggtactattaatgcgattttccataatggtcaaacagtcactgagcttaaagcaggtgaagaagggattatcttcttagataaaacggctttttatgctgagtctggtggccaagtaggtgataaaggtcttctgattggcaaagatagccagtttgaagttaccgacacgcaaaaatatggcaaggctattggtcatattggtaaagtcatttctggatcttttattgttaatcataagatcaatgcagtcattgatgtggctcgtcgtgatgctattcgcttaaatcactcagcaacgcatttattgcatgcggcattacgccaagtattaggcactcatgttacccagaaaggctctttagttaacgataaatatctgcgttttgacttctctcactttgaagcagtaaaaccagaacagttacgtgaaattgaagacattgttaacgcgcaaatccgccttaactcgccggttgtcaccgagttaatggatcttgaagatgcgaagcaaaaaggtgcgatggcactctttggtgagaaatatgaagaacgtgttcgtgttttaaccatgggggatttctcaactgaactttgtggtggtactcacgcagccagaacgggtgatattggtctattccgcattatgagtgaatcagggactgcggccggtattcgccgaattgaagcgattacgggggctacagcgattgaaagtgttcatgagcaatcggatctgatttctcttgtggcacatgcacttaaaagtgatggtagtaatttagttgagaaaattaaaacggttcaagaaaaataccgttcattagaaaaagaacttcaacaactgaaagatcagcaagcagctcaagaaagctcctcgttaggaagccaagctaagaatgtgaaaggtatcaaacttttagttcgtgaactgaataatgttgaaccaaaaatgttaagaacaatggttgatgatttaaaaaatcaattaggttcagcaataattgtactttctactatttctgatggtaaagtgagcttaattgtcggtgtgactaaggatttgactgctaaaataaaagcaggtgagctaattagttttgtcgctcagcaaatcggtggtaaaggtggtggtcgccctgatatggcacaagctggtggtacagatgttgaagcgttacccgctgctttagcgagtgttgacgagtgggtagaatcgcatctttaagcgatagctacctgaaaaagcgttatccctagtttttaggggtaacgctttatgtaatattgacaatccgttaaataatcaatcacaaaatttatattttgttatgaagtatgggctatatgtgataaataatgattatacgaattgacaatgtatgatggataatggccgggaaattctagagacccgactcttgtaaattttcaaggagcaaagaatgcttattctaactcgtcgagttggtgaaacgcttatgataggcgatgatgtaaccgtaaccgttttaggggttaaaggtaatcaggtacgtattggcgtaaatgcccccaaagaagtatctgtccatcgtgaagagatctatcaacgaattcaggccgagaaaactcagcccacagataactactaagcaatctcttatttttagctagttaccctttcttcgtaagcgtccacacttttgccgggtctgggcgcttttcttttctatagaactttccattttctttctcgttcttcacctcgctcttttgaactgtatttattattacactatccgcttattctgattgacagaattgaaagtctttttactgcttatcattcgattcataattattagtagggggaataaaattattcgtcgatgagataaaatgcttgaatgatttttcatcagcgatatcatggtattcagttcttttttagcctttcttgctgataaacgcatcagtttgtttgtgaagtgttcaaacgaacctatattcgtaaaaagttgagaaaaattgtttgacttctcaggctgagaaagtaatatgtgcgccacacagagacgagatgttcacaaagaacttcttcgagtggttctaaatatggtgagatggccgagaggctgaaggcgctcccctgctaagggagtatgcggtcaaaagctgcatcgagggttcgaatccctctctcaccgccatttagatttgcatccttagctcagctggatagagtactcggctacgaaccgagcggtcggaggttcgaatcctccaggatgcaccatattccaaccccatgattaaatgtatggggtttttattttggtgcaaatagtgaataatttgcattaaaagagtaaaattaaacaacgtgcatccttagctcagctggatagagtactcggctacgaaccgagcggtcggaggttcgaatcctccaggatgcaccacttatttctcgacattgcacaatgtaatgtgagaggcaaaaagataacgacgcatccttagctcagctggatagagtactcggctacgaaccgagcggtcggaggttcgaatcctccaggatgcaccatctttttataaagttagcttatcttagttaaattagtacgactgcatccttagctcagctggatagagtactcggctacgaaccgagcggtcggaggttcgaatcctccaggatgcaccatctttaaagcctcgcttatcgcggggctttttgctttttctctttcctgcattgtttatatattatcgatttgtttcgcatcaactaataacgccgatatcatctaatcagcgacaatttggtgactttgcgataaagtaactgttatctacttattaacattaaccaacgcgggaggtcacctttgatcccggacgtatctaaagcgctttcttggttggaagcccatcctaaagttttatgtggtatccaccgtggtatagagcgagaaaccttaagagttactcctgatggtcatttagcggctacaggacaccctgtcgagctaggtaagtcactcactcacaagtggatcacgacagattttgctgagtctctgttagagtttattactcctgttgacgataatattgatcacaccttacattttttaagtgatttgcatcgctatacggcacgtcatttaaccaatgagcgtatgtggccgatgagtatgccttgctttattgaagccgaagataaaataacattagcgcaatttggtacctctaatgttgggcgttttaagacgttatatcgagaagggctgaaaaatcgttatggtgcgttaatgcaaactatttctggtgtgcattacaatttttcgttacctatcgaattttggcaagcgtgggcaaatatcaccgatgaagaaacaggtaaagaggcgatttcagacggttatttacgtttgatccgtaattactaccgttttggttggataattccttttttctttggtgcttcgccagctatttgtggttcattcttaaaaggtcgaaaaaccaatttaccctttgaaaatacccctaaaggcgccaaatacttaccttatgcaacttcgttgcgcttaagtgatttaggctataccaataagtcacagagtgatttagatattacttttaatcatctagagacttatgtgaaaggtttgaaaaaggctattcataaaccgtcagaagaatttgctaaattaggtgtaaagaaagacggtaagtatattcaattaaatactaacgtattacaaattgaaaatgaattatatgcgcctattcgtcctaaacgcgtagtcaaaggggatgaatcaccttctgatgcattattacgtggtggtatcgaatatatcgaggttcgctcattagatatcaatccatttacgcctatcggcgttgatgaaacacaaatccgtttcttagatttattcttgatttggtgtgtattagcggatgcaccagaaatgaatgcagaagaattggcctgctgtcgtgcaaattggaataacgttattctagaagggcgtaagccaggtcaagttattggcatgggttgtggtgaaagaaaagagccattagcacaagtggggaaagcgctttttgctgacttacagcgcgtagctaaggtattagatagctgttctggaactaaatatctagaagtttgccttaagttagaggaaatgtttgataatccgcaattaaccttctctggcagattattagaaaaaattaaagcacagggtattggcggttatggtctatctttagctgaagaatatcatcaacaattagtcaataccgcttatgaagtgttaacagatgatgcttttgaacatgagagaatttcatctattaaacgtcaggcagacttagaaaagagtgataccatttctttcgatgaatatttgaagctccatgctgggccaaataatgatggtgtggcttcttaaaactcagatagaaaaaagccacactaaaatttgtgtggctgaataaattctatagagaaatagggatgataacattttgcgcgtattcattactaagaccgaggcgctcgcagaaagtttcatgttctcttaaaaatatttaaaaattttcttaggaggttttttatgccgttattggatagctttactgttgaccatacacgtatgtctgcacctgcggtacgcgttgctaaaacgatgaaaacaccctctggtgatactattaccgtttttgacttacgctttactgtcccaaataaaaaagccatgcctgagaaaggaattcatacgttagagcacttatttgcaggtttcatgcgtaatcacttaaatggtgaaggtgttgagatcatcgatatttcgccaatgggatgtcgtacaggcttttatatgagcttaattggtcagcctgatgagcaacgtgttgctaatgcatggaaggcagctatggaagatgtattgaaggttaaagatcaaaaccatattcctgagcttaatgtctaccaatgcggaacttatgaaatgcactcgttagctgaagctcaagatattgcacgagacattttatctcacactattggcattaatcataatgatgaattagcactaccagaagacaaactcaaagagttacaaatctagttacagttgctttatagataaagagacaataactcaagctatttgctcttgatttgttgtctcttttaatttgatgggtgatttatcataacggccaacgccaattgcattgaaccgctattaataatcgctagtgacgagagggcgtaagatggcggatcaaggctttcttaatcacattgtcttgcacttccaacacttcaaattcataaccatcaatcgttattttggcacctactacgggtaaatcacccaactcttcaataataaccccattaattgttcgtgcttcattttctggtaaatggcaagcaaaggctttattgatatctcggatattagttgtgccatccactaatagtgaaccatctttttgtgggatcacttcttctgctaaagaaggagacattgaggtagtaaaatcaccgacaatctcttctaggatatcttcaacagtgactaatccttgaatttcaccatattcatcgacgacaataccggctttttcattattacgttgaaaattaactagttgtaagctaagtggtgtactttctgggataaaatagattttatcagccgctttaatcaaaatttgtttagtaaattctttcttctctgtcataagacggtaagcttcgcgtactcgtagcataccaatgacatcatcgagggtatcacgataaaggacaatacgcccatgaggggagtgagttaactgtctgacaatggatttccactcatcattgacatcaataccaaaaatttcatttcttggtaccataatatcgccaatggtcactttttctaaatccaaaatagaaatcagcatattttggttacgctgtgacagtttcgattttgattcattcacaatggtgcgtagttcttcttttgataccgcattaccctgtattacgggggatttaataccgaaaatgcgcataaacactaaggtaatttggttaaaaaaccacacaacgggcaacatgattttctgtaaaggtgacaaaagaacgctacttggataagcgaaacgttctggataaagcgctgcgatagattttggtagtacctcagcaaaaataagaatgacaaaggttaatacacctgttgcaatagctactcctgcatcaccatataaacgcattcctacaatagtggcgagagcggaggcgacaatattaatcaggttattaccaattaatactaagctaatcaatctatcgggacgctgtaatagtttttctactcttttggctgagcgattaccttgcttggccgcgtggcgtagccgataacgattgatagtcatcatgctagtttcagtgcctgaaaaataggctgaggcaaagatcataccgataagtatgataatgagcgttgttgtcgacacatgctccaaaattgagttccttttgctaccttaaaatgaaaagattaattaagcattaactcttgcaataaacgattaccaaaaaaagctaatgtcaaaataatggcaccgatcaggttaaaaataaccacttttttcccacgccaaccctcacggaagtgtccccataataaaatgatgtagacaaaccacgcaataatagaaaatattgatttatggatattttctttaccaaaaatattatccatatataacaggccggtacacaaggttaatgtcagtaatactacccccacttgggtaatatgaaacattttacgttcaattgacattaatggtggcatttgtggtgaaaattttagtttcttattttttagttgatagtcgagccagctgagttgtaaggcatataaagcagcaattaacaaagtggcgtaacttaataaagcaagcccaatatgaataaagagcgatgtgctactttcaaggtgggtgacaaactcacctggcatcaaggcggcaataatgagattgactatggaaaagcaataaacaataggcagcaaaaaccaagctctaccacgggaagcaacaatggtcatgataacgcagaccattaaactgaccaccgcccctaaattggtgagtgacagattttgcccgctatgtggacggaaaatcaaaaattttaatgagatagcatgggtcacaagggcgaccaccgcaaaaagcagcgctaatccacggtatccattttgctcttttctcagcaaactggggagaataaacaccagactgagtaaataagcgcagacagcaacgatagagattgatataacgggcatagtttcgcttacataatagggtacataattgcttagtatagcgctaggtgaattccgctccaactattgaagtcattaagcgtaaatctctatgcagagatctgcgcgtcatcgtgatataatcgataaaatagacgacagacaagcccaactttaacactgagctaagataatgtttgagaatttaagtgacagattatcgcgcacattgcgcaatatcagcggcagaggccgactgaccgaagaaaacattaaagacacactgcgcgaagtgcgtatggctttattagaagctgatgtggctttgcccgtggttcgtgagtttattgcacgtgtcaaagagagtgcagtaggtcatgaagttaacaaaagtctgaccccaggtcaggaatttgtcaaaattgtacaaaatgagctggtaaatgcgatgggagaggtcaataacgatcttgacctttcagctcagcctcctgccgtggtattaatggctggtttacagggtgcgggtaaaacgacaagtgttgctaaactcggtaaatttttaaaagagaaaaagaagaaaaaagtattagtagtttctgctgacgtctatcgtcccgcagcgattaaacaactggaaaccttagccgaaacggttggtgttgactttttcccttcaacggtacaagaaaatcccgtcaccattgctagcaatgcgttaaaacatgctcagctccaattttatgatgtattgctggtggatactgcgggtcgtttacatgttgatgaaggcatgatggaggagatccaacttcttcataaagcaatcaatccagtagaaaccctatttgttgttgatgcaatgacaggccaagatgctgccaacaccgcaaaagcctttaatgaagcactccctttaacaggggtggtattaactaaagttgatggtgatgctcgtggtggtgcagcattatctattcgtcatatcacagggaaaccaattaaattcctcggtgttggtgaaaaaacagaagcattagaacctttccatcccgatcgtattgcctcacgtattttaggcatgggcgatgttctttcattaattgaagatatcgaaagtaaagttgaccgagcgcaagctgaaaagctggcaactaaactaaaaaaaggggacggttttgatttaaatgatttcttagatcagttaaagcaaatgaaaaacatggggggcatggcgagtatgctaagtaaaatgcccggcatgtctcaggtgcctgatgcggtgaaatcacaaatggacgactcaattttagtcaaaatggaagctattattagctcaatgacgaaaaaagagcgccaaaaacctgaaatcatcaaaggttctcgtaaacgtcgtattgcgatgggatcgggaacacaagtgcaagacgtcaaccgcttattaaagcagtttgatgatatgcaacgtatgatgaaaaagatgaagaagggcggcttggctaagatgatgcgtggcatgaaaggtatgatgccaccaggctttccaggtcgctaaaagcaaaaagtccgaaaaaaacgtcgctttggattgcttttttcgccaaagtgagtaaacttttcgggctttttatatgacaaccggacgccattcctcgatggggtctggttgttttgttaactaatgaggatgttatggtaacaattcgtttagctcgtggcggcgcaaaaaagcgtccgttttaccaagtagtcgtgaccgatagccgcaatgcgcgtgatggtcgttttattgaacgtgtaggtttttataacccactggcaaccggtaatgcagaagaattacgtttagacgtagaccgtgttgaacattgggttgctcaaggcgcaactgtttcagaacgtgttgctggcctgatcaaatcagcgaagaaaagcgcttaatctgtcgcggtggtaacaatgagcgaacaaaaaacctttaaagagcctgtagaacctattgttatgggtaagttgggctcaccttacgggatccgtggttggctcagagttttttcttccaccgaacatgccgaaaacatttttgaatatcaaccgtggtttattcaacgacatggtcaatgggaatccattgagatagaaacttggaaacaccacaatcaagatattatcgtcaagctaaaaggtattgacgacagagatgctgcaaatattttgactaattttgaaattgtcgtaagtgctacacaacttcctgatctagacggtgagtattactggaaagatctgatgggttgtcaggtagaaactgacaagggctacgatttaggtgtcgttaacgacatgatggaaacgggctcaaatgacgtcatggtaatcaaagcaaatctgaaagatgcattcggtgtcagggagcggttagttccgtttcttgatgggcaggttatcaagaaagtcgatctctcagcgaaaaaaattatcgttgattgggatcctggtttttagattctccggttaacggttctcaacagtgggacagtgcaaatgtggattggggtaattagcctatttcctgaaatgttccgcgctataaccgagtacggggtgactggtcgggcagtgaagcatggtctgctgaatgtggaatgttgggatccccgagatttcacttatgacagacatcatacagtagatgatcgcccctatggcggtggtcccggtatgttgatgatggtacaaccgttaagggaagctattcatcaagcaaaagctgcggcaggtgatggtgcaaaggtgatttatttatcacctcaagggcgcaaactcgatcaacaaggtgtttgcgaattggccacaaatgagaaattaattctggtttgcggtcggtacgaaggaatagatgagcgtgtcattcagaccgaaatcgatgaagagtggtctgttggtgattacgtattaagtggtggggaactccctgccatgataatgatagatgcagtagcacgttttgttcctggtgttcttggacatgcggcttcggcgaaagaagactcttttgcagaaggattactggatcatcctcactatactcgtccagaggtgttagatggtatggcggttccggcagtgttactgtctggtaatcacgctcatattaatcgctggcgtatgaaacaatcgctgggccggacctggctaagaagacctgagcttctggaaagcctagctctgactgacgagcaaagagtgctgttagcagaattccagcaggaacatttgcaaagaacagcagagtaagtctgacacaaagtgtcattaatatcagtttacctagggtaagagagttattatgagcaatattattaaacaaatcgaacaagaacaaatgaagcaagatgtaccttcatttcgtccaggcgataatgtagaagttaaggtatgggtcgttgaaggttctaaaaaacgtctgcaggcattcgagggcgtggttatcgctattcgtaaccgcggtctgcactctgcatttactgttcgtaaaatttctaatggcgaaggtgttgagcgtgtattccaaactcactccccagtcgtagatagcatcacagttaaacgtcgtggtgcggttcgtaaagctaaactgtactacctgcgtgagcgttcaggtaaggctgcacgtattaaagagcgtcttaacgctaaataatacgctttcgcacatccgaaagttatggttaaaaggccagcatcagctggcctttttttgactataacctgctctatttcctctaatgtcttctatctttttataagcactcgacaatagctcactctcttgcctatttttctcatcattaaataacatctcttataaagtcgtttcatctgctaggtgaaggccaatttcttgcgggtgtaaaattaaaattacagtctgctatttttattttatcttagtcacattttttgtgttattttggatatttataatctattgatttataagaataaatctaacaatatctctattatgtaaacatatgattacgattataccttttttattgaaaatatggattgatttctttacattgcatgttatcttatcgtttagacacacaaaaatcacaatgacagacataaaaaaggtaacgattatgatcatgcaaaaagacgcactcaataatgtcaacatcagcgaagagctggtgttaattacgccggaagagttaaaacaaaaatacccgttgagtcgtaatgatctgcatgccattactcaatcacgtcaaactatttctgaaattgttcaacgtcgtgatccgcgtttattagtggtatgtggcccttgttctattcatgatgtcgatgttgcgttagattacgcaaaacgtctaaaagtcttagcgtctgagttaagtgatagtctgtatattgtgatgcgtgtctattttgaaaaacctcgtacaacagttggttggaaaggtttaattagtgatccgtttatggatggcagttttgagatggaaaaaggcttacatattgcccgtaaactattaacagagttggttcagttaggtttacctttagctacggaagccttagatcctaacaatcctcaatacttaggtgatttatttagttggtcagctattggggcaagaacgaccgagtctcaaacccatcgtgaaatggcatcaggtttatcaatgcctgttggttttaaaaatggcacagatggtaatttagatacggctattaatgcgatgaaagcggcttctatgccacatcgttttatgggcatcaatcaatcaggacaagtctgtttattacaaacacaaggcaatcctgatggacatgttattttgcgtgggggtaagaaacctaattaccatgaagaagatgtcgcgttatgtgaagctcatatgataaaagcgggattaacaccatcattgatgattgattgtagtcatggtaattcaaataaagattttcgtcgtcaatctgtcgtggttgattcagtgattgagcaaattaaaaaaggtaatcaatcaataacaggaattatgttagaaagccatattaatgaaggcaatcagtcatcagagcagcctcgtagtgagatgaagtacggtgtttctgttactgatgcatgtattagctgggaaaccactgaatcggtgttaagaaatctgcatcagcaaatttcgccagttttagcacagcgtgcagcgcaactaagaaaagttagctaacccaataacactttaataagaagaggcaagcatagatggctgaagaattacaaaatttgcgagagcaaattgatcaggtggataaaacattgctttctttactcgccaaaagaatgcaattggtagcagaagtgggagaagttaaaaatcgccacgggttacctatctatgcaccagatagagaagccgcaatgcttgcttctcgacgtaatgaagcagaaaaaatgggtatttctgctgatttaattgaagatgttttacgtcgagtaatgagagagtcatatagcaaagaaaatgataaaggctttaaaacacttaatccccaattaggcaaaattgtcattgtgggggggaacggaaaaatggggagacttttttctcgtctctttacactttctggctatcaagtggaaagtcttgaagcggatgagtggcaaagtaaatctccggctatttttgcggatgctggtatggtgataatcagtgtcccaatccatttaacggttgatgttattgagcaattaccgcccttgccagaaaattgtttattggtagatttagcctcaatcaagcaagcgcctttagaggcgatgttaaaagcacataatggccctgttttaggactacatccaatgtttggtccagatgtgccaagtttagcaaaacaagttatcgcttattgtgaagggcgagatttatcacattttgagtggttgcttgagcaacttatggtgtggggagcaagagtagaggctattactgcacaagagcacgataaaaatatgagttttatccaagcattgcgacattttactacttttgcatatgggcaacatttggtgaaagagaatgtcgatttagccagtttattaagattatcttctcccatctatcgtttagagctagcgatgattggtaggctctttgctcaagatccacaattatatgccgatattattttatcttcacaagaaaacattaacttgatccgtagatatcatcattcattaggtgaagctatagccttattagatataaacacaaaagatgaatttattggctcatttaataatgtaagtgattggttcggtgattatgcttcacaatttatgaaagagagtggtgcgttattacaaaaagccaatgatagccggatttagtataaatatacataaacgctatacctaatacttatagtaagaaaaacgaatgacaggttatgttattcgttttttattttatatgttatatcttgcgataaatattaccactcatcatcacaagggggccaaacacagcgagtagattgttgagtattgctattatgttgacaatactgattaacagtgctggtatctttgattttattatcccaagtataagcgctagcataaaaagcgaataaacttgatagtataaaaataattaatttcttcattttcttctcctaacgttgataggtataacttaataatctttcggatcggggcatgggcttacggtacagcgagttgaacttatatggtgatctaatgaataggagtaatagccttttcctttatgagcactatcaacgaaattcaaatagctcaaacctagcagtagcatgataattgtatgcatatctattccttacttattcaatattcataatgaataaaccaatatacatttagaaaaaatgaatgaaatttctatttttagcaatcacctaataatgacaacattatattatttttaatttatttgttatgtaattgttgtctatgggtttaattagttaatgataaatgttcaagaatgtcttttctttttaagctatttgttggtgagatcttaaatttgcataaaataattaacggatattaaaactataacaacgatcaaaaaaatacctataacagatgccgtaaattatattggtcgacgttgtttttttgcaaaaagtgctaacgatttaattgtattattttttatttctattccgatgcgttttttaaggggttaatgatggattttataatacaactcgccattatattagtttgtttattttatggagcaaggaaagggggaattgcattaggtctattaggcggagtggggctggttattttagtctttatttttaatttacctccgggtaaaccgcctgtcgatgtgatgttagtgattattgctgtcgtctctgcatctgcaacgttacaagcatcgggtggtttagatgttatgttgcaaatagctgaaaaattattaagaaaaaatccgaagtatatttctattgttgcacctctcgttacctgtaccctgactatattatgtggtactggacatgtggtttataccattttgcctattatctatgatgtatcgattaaaaataatattcgtccagaaagaccgatggcagccagtaccattggttcacaaatgggaattatcgcaagtcccgtatctgttgcggtcgtcaccttagtggcaatgttaggtaatgtcacttttaatggtaagcatcttgaatttttagatttattagcgattaccattccatcaacctttattggtattttagccattgggatttttagctggtttagaggtaaagagttagataaagatcagcgcttccaagattttatttccataccagagaatcatgattacgtttatggtgatactgcaacattgttagataaaaaattaccaatgaaaaattgggtagcaatgtggatattcttaggtgcgattgcggttgttgctgtattaggtgcattttctgaattacgtcccgtatttaataataaaccattatctatggtattagttattcaaatgtttatgttattagcgggcgcttctattattattatttgtaaaactaatccctcacttatttctaaaaatgaagtttttcgctccggtatgatagccattgtggcggtctatggtattgcttggatggcagaaaccatgttctctgcacatatgaaagaaatagaagctgcattaggacaattagttcgtgagtatccttgggcttatgccgttgtcttattacttgtttctaagtttgttaattcacaagccgccgcattagccgcaatagtccccttggctttaggtattggtattgatcctgcctatattgttgcttcagcaccggcgtgttatggctattatattcttcctacttaccccagtgatttagccgctatccaatttgaccgttcaggaacaacacgtataggtcgttttgttattaatcatagctttattttaccgggattaattggtgttactgtttcttgtatttttggctgggtatttgctgctatgtatggttttttataattagctaaattatcctgggaatagagtcataaaagtagaaaagccagataacaataagctatctggcttttggttataaagtagggtaataagctattgtatttcaacgggtacaatattttctgaaggatagcatcctaatactttgagtgaacgagatgtttttgataagtcatgtaatgctttttgcatattgatatcccgtaaattagcttgtacatcaatataaaacatctcttcccaaggtgtaccatttattgggcgagactctaatttagtcataataatgctgtattgttttaaggtaattaaagcatcaactaatgcccctgcttgttgccccgttgccattaaaaaggtggtttttgcaggtacttgttctgatacatcaataggtttacgggcaatcacaataaaacgagtaacattaatttgttgattagctaaattactagcaagtggtgttaaattataaagcgatccgccagcttcactgccaatagcggctacatggggagattgtgctaatgcaactttttccattgccgcagctgtgctttcacaatattcaattttccagtgagggtattgatttaaatagtgactgcactgttggaatggttgtggatggctataaatagtgtgtaattcttctaggctactcttaactgctgttaataaagcatggtttatcggaatacgaatttcgccaacaatcgacagcgaggtggtttgtagtaaatcataaacatcattaattgcaccagagctggtgttttcaataggtagtaaaccgtaatccgcttgtcctgtttctaccagtgtaaaaatatcttcaaatttatggcaagtgcaatcaacaaaagtatcaaaatggcgggctgcatattggcgagcggcaatatgagaataagaacctttagggcctaaataagcaattcttgcagattcatttgcagtcgcattaaggtgttgctgtaaaatggcttgctgcgtgagcaccgaatcttcgatgatcatttggaaaatacggctgatataaaagccatctaatccaacgtttttccctttttcgattaatagttcaagcagttcacgctcacggtttttatctcgaatagggcggtgggtatttaatttaaattgggcaacttcagtcgataattggcgtctttgagctaatagtgaaagtagttcagaatctagcgcagtgattttatctctgattgctaataaatcgagtttttccatgttagtgccctatacttttgtatcgtaccattttaaataaaaaagcctccatttttggaggctattgtcgttcttacttttctttctgaaataaacaaagcctctttaagaatagagtaaaaagaaaaagaagaatggcaaaaaagagtgagtcatcattatatggattgattaactatttaacatatagctatcaaacatgatgatgggtgaggagtcaagaaaaatacaataaaaagcgcatcacgaggatgcgcagaggcgttttgagtcagtgaattattctaatttttaatcaagcttcactacttatatttcatttacgagtaaattttcttcttttaagctattggccgcacgtcgagactcatttttatgctgaactttatttaattgacgttccaattttgccaagagatcattaattgccgcatacatatcaacatgttgtgcgtttgctacaagttgtccattcggagtatgaatacttgcatcaacactaaaaccttttggatccttagtgagaataatatgagggttgattaaatttacctgccatttgttaagtttagttaaacggctttcaatgtgttcacgtagtgctggggtaatgtccatttgtttgctagtgatatttataatcatatagttacctctttattactccatcttggataggttcagaatatcgtgatacacaatttaaaacatgatcaagatcactttttgttagaagtttatataacaagtaatagaaacgtgacaaatgataaatagctgaaaaagagtgcttgtagagtcgtgtttattcgttcatattaagagggttggtctgatgaaaagtaagtttttagcctttgaattagcataaaaaaacagcagcgctaggctgctgtttttgatagtaaaaatgtttaagcagggttggctgcaatcagtgaggcaactttatctgcttcttgagttaagcctagttttttgtaggcattttccatatacacaagcgcttcacgtgtagcttcggtatctggataatcacgcatcatttgttcaactcgattaataaccgcgacataagcccctcgtttggtatagaatttcgcaacagagagttcatatttcgctaaacggtttttaagaaaaacaagacgctttgtggcatctgctgtgtagaggctatcaggatagtagcgaactaactggctaaagtctttgaaagccactcttgcatgctgaggatcacggtctgagcgatcaataccaaagaatccttgtaatgcactatcatctaatgcctgagcggttaacccacgcatatatagaacatagtcaatatttggatgggttgggtttaatcgcataaagcggtcaatagcggaaatcgccattggtaactcagctgatttataataagcataaatcagatcaagctgaacttgttgtgagtaaggaccaaaaggatagcgattatcgagagactccagttgtttgatagccgctccataattgccatctagcaatttttcttggcttgttgcataaagctcagaaggagacatatcagcagttgcgtctttgtctgaactagaacagccagaaagtaacaggcttacagtggccgctgccactaggtatttcatgcgtctcatcacgtattgattatcctctgaataggtttgggagtctctccgtgaagctccctgaaatcggttatactataactcattttaaatgaaacggctgtgccgtcaaaatactaacttaatatagaaactatttatgtctcaacaaatacgacttaatgctacagtcgcagattcacagctgggtcaacgcttagatcaggctttggccgaattgttccctgattattcaagatcacgcataaaagagtggatcttagacaatagagtgcaggttaacgataaaatcatcaataagccaaaagaaaaaatgcttggcggtgaaaaaattgaagtcgatgccttaatcgaagaggatgttcgttgggagcctcagaatattccgttaaatatcgtctatgaagatgatgatattttggtgattaataaaccaagagatcttgttgttcatcccggtgcaggtaatcctgatggcaccgtattaaatgcacttctttatcgttatccagagattgttaatgttccccgcgctggtattgttcatcgtttagataaagatacaacaggtttgatggttgttgcaaaaacagttcctgctcaaactcacttggtagaagcattacagcgtcgcgaaatcacccgtgaatatgaagcggttgcaacaggaaggatgacagcaggagggctggttaatgagccaatttctcgacatcccaccaaacgtacccatatggcagtgcacccaatgggaaaacctgcggtgacgcattatcgtgttatggaacatttccgtgcccatacccgcttacgtttgcgtctagaaaccggtcgaactcaccaaattcgtgtccatatggctcatatccatcatccattaattggtgatcaactgtatggtggtagaccgcgtcctttgaaaggggctagtgaagaatttcgtgagacgttacgtcgctttgaccgacaagcactacatgccacaatgttacgcctttatcatcctattaccggaattgaaatggaatggcatgcaccgttgcctgatgatatggtagaacttattcgcgtactaaaagtggacgcagaacagtttaaagatgaaatggactggtaaatgacctcattgatttatcctgattggccacagcctgacaatattggcgcatgtagcacattaagaactggcggtgtcagtttgccaccttataacagccttaatttaggagcgcatgtgggcgatgatgcgctattggtagaacaaaatagacgtatcatttgtcaacaagctcaattacctgaaatgccattatggttaacacaggttcatggtattgaggtggttaatttggataatcaagacaatcataccgttgaaggcgatgccctttacacctctagtgctaataaggtgtgcgctatcatgaccgcagattgtttacctgtgctatttagtaccattgatggaacggaagttggcgctgcccatggtggatggcgcgggctttaccaaggtgtattacaacagacactcactcaatttaaagcctctaatgagaagattatggcgtggttagggccagcaataggccctaatgcttttgaagtaggggcagaagtccgtctcgcttttgtagaaaaaaatattgcctttgatagcgcatttattccccacaatggcaaatacttagctaatatttatatgttagcgagaataattctgcaggaaagtggggtaaatcagatttatggtggggacttttgtactgttagcgataaatcacgctttttctcctatcgacgtgaacatactaccggacgtatggcctcattaatctggatcaaatagacgctctccaacgtttattcttccttatcccaaatataggcaaatatttttgctcaaaattgtcattttgagcttgaatattgtctaaatgacctcatctattctccagtgataaattttaaatcgaattttacttggaggtgttatgcgtctggataaattaaccaataaattccagcaagctctcgcagacgcccagtcattggcacttgggaacgataatcaatttatagaacccatacatttactgagtgcgttatttaatcaacaaggtggctctattcgcccactattaacatccacaggtgttaatgcctcacaatttaatgaaagaattaatgatgcattatctcgattaccaaaagtggaaggtgctggtggagaagttcacccttcaaacgatttaattaaacatcttaatttatgcgataagttagctcagaaaaaaggtgatgaatttatttcatcagaactttttcttttagctgccatggaaagcggtggtcaggttgctgatatgctaaaagccgccggagctaacaaagccagtttagaattagccattgaaaaaatacgtggtggagaaacagtgaacgatcaaaatgcagaagaccaacgtcaagcattgaaaaaatatactgttgatttaacagaacgagcagaacaaggcaagcttgaccccgttattggacgtgatgaagaaataagaagaacaatccaggtattacaacgtcgtactaaaaataacccagtattaattggtgagcctggtgtaggtaaaaccgcgattgttgaaggtttagctcaacggatcgttaatggagaagttcctgaaggtttaaaaaataaacgtgtgctttcacttgatatggggtctttattagcaggggctaaatatcgtggtgaatttgaagagcgtttaaaagcggtattaaatgatttatctaaacaggaaggtagtgtcattctgtttattgatgaattacatactatggttggtgctggtaaagctgatggtgcgatggatgcagggaacatgttgaaacctgctttggcacgtggtgaattacactgtgtcggcgccactacattagatgagtatcgccaatacattgaaaaagatgcggctttagagcgtcgtttccaaaaagtttatgtggcggagcctacggtagaagataccatcgccattttgcgtggtttaaaagagcgttatgaattgcatcaccatgtacaaattacggatccggcgattgtagcagcagctactttgtctcatcgttatatttctgatcgtatgttgccagataaagcaattgacttaatcgatgaggctggggcaagtctacgtatgcagatggattcaaaaccagaagcattagatagactggatagaagaattattcagctaaaacttgaacagcaagcactgcaaaaagaatctgatgatgcaagtaaaaaacgtttagctatgttaaatgaagaacttgcagaaaaagagaaagagtattctagcttagaagaagagtggaaagcagaaaaagcagagcttactggtactcagcatataaaagcagaattagagcaagcgcgtattgcactagagcaggctcgccgtagtggtgatttggcaaaaatgtcagagatccaatatggtcaaattcctactttagaaaaacaacttgctgaagccaataaaactgaagataagcatatgaaactgttacgtaacaaagtaacagatgctgaaatcgctgaaatcttagcacgttggacaggtatccctgtgtctagaatgttagaaggggagcgtgaaaaactgttaagaatggaacaggaattacatagacgcgttatcggccaagatgaggcggtaaatgcagtctctaacgcaattcgtcgtagccgtgctggattatcagatccaaatcgcccaattggttcgttcttattcttagggccaaccggggttggtaaaactgaattgtgtaaagcgctcgctgatttcttgtttgatagtgatgatgcgatggtgcgtatcgatatgtctgagtttatggagaaacactctgtttcacgtttagtgggggcgcctccaggatatgtgggctatgaagaggggggttacctaacagaagctgttcgtcgccgtccttattctgtcatcttattagatgaggtagaaaaagcgcatcctgatgtgtttaatattttattacaggtattagacgatggccgcttaacagatggacaaggtagaaccgttgatttccgtaataccgtagtcattatgacatcaaacttaggctcggatttaattcaagagcgcttcggtactcttgattatccggcaatgaaaactattgttatggatgttgttggtcaccactttagacctgaatttattaaccgtattgatgaggtagtggtattccatccattaggtaaagagaatattgccgctattgctcaaattcaattacgtcgtttgtatcagcgtttagaagagcgtggttatcacgtgactattacgggagcagcattagaaaaactgggtgaagttggattcgacccaatctatggtgctcgtccattgaaacgtgctatccagcaagaggttgaaaacccattagcgcaagatatattgtcgggtaaattagttccgggtaaagaaattatcttggacttagatgacaatcagatcattgcaaaacagtcataaagtatctttatatatagtagtgatatatagaagatgtcattaaattgaaaaagaggcctgaataggcctcttttttatgcctgcagttttgtgtttttaaaggtaaatgaacagaacaaagagaagagtacctatttgatctattttttgagcaataaatgtttataaatagcgctaaaatcgatgctctgattattaaatatgctgttgaacattttttttcaaaaaactattgccagcctcagaaaactccctataatgcgtcctcgttgtcacggcatagggcgctaagcgaaccggctgagagaacaaaataaaaagtgaaaagcctgataaattagcgcttgacactgaatgaggaagatgtagaatgcacctcctcgcaacaacgcagaagaccggaaacggcagcgacagttgcactgctctttaacaaattatcagacaatctgtgtgggcactcgcagaggcgatatcttctaaaaaattagatgtatcaagtcttgaagagtggctaacaagttaattcatataatgaataagctaagttttcgatttctttgagcatcaaacacttttaattgaagagtttgatcatggctcagattgaacgctggcggcaggcctaacacatgcaagtcgagcggtaacaggagaaagcttgctttcttgctgacgagcggcggacgggtgagtaatgtatggggatctgcccgatagagggggataactactggaaacggtggctaataccgcataatgtctacggaccaaagcaggggctcttcggaccttgcactatcggatgaacccatatgggattagctagtaggtggggtaaaggctcacctaggcgacgatctctagctggtctgagaggatgatcagccacactgggactgagacacggcccagactcctacgggaggcagcagtggggaatattgcacaatgggcgcaagcctgatgcagccatgccgcgtgtatgaagaaggccttagggttgtaaagtactttcagcggggaggaaggtgataaggttaatacccttgtcaattgacgttacccgcagaagaagcaccggctaactccgtgccagcagccgcggtaatacggagggtgcaagcgttaatcggaattactgggcgtaaagcgcacgcaggcggtcaattaagtcagatgtgaaagccccgagcttaacttgggaattgcatctgaaactggttggctagagtcttgtagaggggggtagaattccatgtgtagcggtgaaatgcgtagagatgtggaggaataccggtggcgaaggcggccccctggacaaagactgacgctcaggtgcgaaagcgtggggagcaaacaggattagataccctggtagtccacgctgtaaacgatgtcgatttagaggttgtggtcttgaaccgtggcttctggagctaacgcgttaaatcgaccgcctggggagtacggccgcaaggttaaaactcaaatgaattgacgggggcccgcacaagcggtggagcatgtggtttaattcgatgcaacgcgaagaaccttacctactcttgacatccagcgaatcctttagagatagaggagtgccttcgggaacgctgagacaggtgctgcatggctgtcgtcagctcgtgttgtgaaatgttgggttaagtcccgcaacgagcgcaacccttatcctttgttgccagcacgtaatggtgggaactcaaaggagactgccggtgataaaccggaggaaggtggggatgacgtcaagtcatcatggcccttacgagtagggctacacacgtgctacaatggcagatacaaagagaagcgacctcgcgagagcaagcggaactcataaagtctgtcgtagtccggattggagtctgcaactcgactccatgaagtcggaatcgctagtaatcgtagatcagaatgctacggtgaatacgttcccgggccttgtacacaccgcccgtcacaccatgggagtgggttgcaaaagaagtaggtagcttaaccttcgggagggcgcttaccactttgtgattcatgactggggtgaagtcgtaacaaggtaaccgtaggggaacctgcggttggatcacctccttacctaagagatacgtgttatgtgaagtgctcacacagattgtctgatgaagaacgagcagagataccggtataggcttgtagctcaggtggttagagcgcacccctgataagggtgaggtcggtggttcaagtccactcaggcctaccacttttcctttatgctgtgttgtgaagcaactcgtttacattaagtaaacttcgttactccacgccttgcctaaagaaaaagcttcttattataagaagaaaaaggagtggttatacgggtattaaaacattatggggctatagctcagctgggagagcgcctgccttgcacgcaggaggtcagcggttcgatcccgcttagctccaccataatctcttgaatataaaacaatgattcagagtatattaggaatagtatactgtgaattattatgctctttaacaatctggaacaagctgaaaaattgaaaacaaatcaatatatcaccgaggtatattgatgagtctctcaaaatctcaaactttgaatgtgttttgacatcaaagtgggatgagcgagcaatttacagttcgaggcggacagcgcgcagcaagcgcagcatacttttgtatgtgagcattgcgagcactgcccaacgaagaaatgtaatctgcgcagccatcaccacccagatagtctttgaaagagacactttcgggttgtgaggttaagcgaataagcgtacacggtggatgcctaggcaatcagaggcgatgaaggacgtgctaatctgcgaaaagcgtcggtaaggtgatatgaaccgttatacccgacgatatccgaatggggaaacccagtatccaatggatactatcattaactgaatccataggttaatgaggcgaaccgggagaactgaaacatctcagtaccccgaggaaaagaaatcaaccgagattcccctagtagcggcgagcgaacggggagcagcccagagtcttaatcaatagcagtgtcaggagaacggtctggaaagtccggcagtaaagggtgatagccccgtatctgaagatgctgttattgtgaactcgacgagtagggcgggacacgtgttatcctgtctgaatatggggggaccatcctccaaggctaaatactcctgattgaccgatagtgaaccagtaccgtgagggaaaggcgaaaagaaccccggcgaggggagtgaaaaagaacctgaaaccgtgtacgtacaagcagtaggagccccatcactcaagtgcctcgcactgagtgatgcaagaacatcaccgaaaatagcgccgaatttgctaacaaggttggtcgattttttcaagccgtcgcgcagtgtacctagaagtacacgagcaacggaagttaaaaaatcgggcaagattgaacgcaaaggcaagcgggacatttgaggatggggtgactgcgtaccttttgtataatgggtcagcgacttatattctgtagcaaggttaaccgcataggggagccgtagggaaaccgagtcttaactgggcgaatgagttgcagggtatagacccgaaacccggtgatctatccatgggcaggttgaaggttgggtaacactaactggaggaccgaaccgactaatgttgaaaaattagcggatgacttgtggatgggggtgaaaggccaatcaaaccgggagatagctggttctccccgaaagctatttaggtagcgcctcgtgaactcatcttcgggggtagagcactgtttcgactagggggtcatcccgacttaccaactcgatgcaaactgcgaataccgaagaatgttatcacgggagacacacggcgggtgctaacgtccgtcgtgaagagggaaacaacccagaccgccagctaaggtcccaaagtcatggttaagtgggaaacgaagtgggaaggctcagacagccaggatgttggcttagaagcagccatcatttaaagaaagcgtaatagctcactggtcgagtcggcccgcgcggaagatgtaacggggctaaaccatgcaccgaagctgcggcagcgacacaaagtgttgttgggtaggggagcgttctgtaagcctgcgaaggtgtactgtgaggtatgctggaggtatcagaagtgcgaatgctgacataagtaacgataatgcgggtgaaaaacccgcacgccggaagaccaagggttcctgtccaacgttaatcggggcagggtgagtcgacccctaaggcgaggctgaaaagcgtagtcgatgggaaacgggttaatattcccgtactggtggtaactgcgatgggggaacggagaaggctaggttgtccgggcgacggtcgtcccggttcaagcaggtaggcagagtgattaggcaaatccggtcacttaatgctgagatgtgatgacgaaccaccaaggtggtgaagcaattgatgccccgcttccaggaaaagcctctaagcttcaggttaccaacaatcgtaccccaaaccgacacaggtggtcaggtagagaatactcaggcgcttgagagaactcgggtgaaggaactaggcaaaatggtgccgtaacttcgggagaaggcacgctggcggtaggtaaagtcccttgcggacggcgctgaagccagtcgaagataccagctggctgcaactgtttattaaaaacacagcactgtgcaaacacgaaagtggacgtatacggtgtgacgcctgcccggtgctggaaggttaattgatggggttagcgtaagcgaagctcctgatcgaagccccagtaaacggcggccgtaactataacggtcctaaggtagcgaaattccttgtcgggtaagttccgacctgcacgaatggcgtaatgatggccaggctgtctccacccgagactcagtgaaattgaactcgctgtgaagatgcagtgtacccgcggcaagacggaaagaccccgtgaacctttactatagcttgacactgaacattgagccttgatgtgtaggataggtgggaggctttgaagtgtggacgccagtctgcatggagccaaccttgaaataccaccctttaacgtttgatgttctaacctaggcccataaactgggtcggggaccgtgtctggtgggtagtttgactggggcggtctcctcctaaagagtaacggaggagcacgaaggttggctaagcatggtcggacatcatgcggttagtgcaaaggcataagccagcttgactgcgagagtgacggctcgagcaggtacgaaagtaggtcttagtgatccggtggttctgaatggaagggccatcgctcaacggataaaaggtactccggggataacaggctgataccgcccaagagttcatatcgacggcggtgtttggcacctcgatgtcggctcatcacatcctggggctgaagtaggtcccaagggtatggctgttcgccatttaaagtggtacgcgagctgggtttagaacgtcgtgagacagttcggtccctatctgccgtgggcgttggaagattgagaggggttgctcctagtacgagaggaccggagtgaacgcaccactggtgttcgggttgtcatgccaatggcattgcccggtagctaagtgcggaagagataaccgctgaaagcatctaagcgggaaacttgcctcgagatgagtcttccctgtcgctttaagtgacctaaaggaacgtttaagactaagacgttgataggctgggtgtgtaagcgtagcgatacgttgagctaaccagtactaatgaaccgtgaggcttaacctgacaacaccgaaagtgttttgtcagagagacgaaacgatgaagtcagcttgttcaagattaaattactggcgactcaccgaaaggaaggaagcgagtaatagacagaccagtttgtctggaacaaactggaacagtgcggagcactggccccgaaggggtgagtctcaggatgagacgaataattacagaatttgaagaattctgcttggcggccatagcgcggtggtcccacctgatcccatgccgaactcagaagtgaaacgccgtagcgccgatggtagtgtggggtctccccatgtgagagtagggaactgccaagcattaaataagacgagaaagccaacccaatgggttggcttttttgcgtttgatattttttattctcaattttatcctttaactaaggaaaagagttatttcaattgctgatagagtaaactgccagccgcggctcctgccacatcataagcaaaatcatgccagctccatcctgtaccttgtggtcgactatcataaagctctttagcgacgcctaaacttattgaaaaagataagccaataactaatccttctcgataagaatagttctgatgatctgcgtaagcattagctcctgcggaggctaccatagaaaataaaaaatgctgtgctttatcttttccttgccaattatcattggcaacatgaaaggattgacaaccatttaacgtgacgagtgaaagtaaaactatcagatagaagctattacgctttagtttcatataatatccacgccttattactatatcttgatcgttagatagttgagcttaaatcttaataagttgaagtatagtggattatagcgacaaaaaagccttacttattttaagtaaggcttataaatagtgcttagcagtatagttaaattagagtatacgactaattagtctatcaacacggatacgccgtaaacgtttaattaattttttcacttttagagggtaaaatttaatactctctaattgttgatagcttttaacaattagtgttttttctctgatacaagctaactctttatggcgttgttcatgtaattcatgatgtggatcgtgaattaagatggcattttcaagatctaatccccaagctcgagggtttagattattacctgtaattaattgccactcatcatcaacccacatgccttttaaatggtaggtattatcaccgtctttccaaagccttactgttaattggtcattatcaataaaacgttgaaaacgttgggtgaatttacgaagattaatctcatataaataaggtaaagcaccgattattttaaagggctcttctggcggaatataaaagtcatttgccgttttatcaccaataataatctcaacctgtttaccatttctcagtaaatgactaatttgacgcaccaaaatagcaggtaaattaaaataaggtgtacaaataaccaacttttcttcagtcacggccatgaggtgggagatagtcttattcaagatatttttcttgcctaagccgaccaatggagtcactgttaactgattatttgaggcatttcctttaatatcgtaaccatcatgtgtgcgtaaattaaagcggaattgacggatacaatttttaatttctgcacaacgcactctctcttctgaatcaagacgttgaatagcatctgattgcaaaaggctatcgacaatgaattgcttcattgtgtttgcgagttcagcattatgaatgatgtgatatctgtcataacggtatttatcaagtttatgcaaatagacgttattaatacttgcaccactgtaaataaccgtatcatcaaagataaacccttttagatgtaatacgcctaatgcttcacgtgtattaacaggaataccataaatagggacgtcaacatcaggatgctgttgtgcaactttatgataccaatctgcatttgttgcatcagcagagacacctatacgaccgcgttgagcacgatgccaatcaacaataacggtgatggaaagttcaggacgttgttgttttgcggtataaagtgcttcaaggatctcctcgcccgcttcatcatgttctagatagagtgcggtaataaaaatctctttttgagcttgcgcgatatatttcaataaggtgctgcgaaacgcggatgtctgataaagcgtttcaacatcagcaactgactgagctaatttaggcagttgtgcaaggtgttgttgatgcttagcaagttttagtttagacaacatcacagtgcttatttctcttgtttatgatgactaaaagagtcatcttctatgtaaaaaattctgtaaccgatcttctgatcataacattagttatataggatgtacgcataaaatcatcttatagagtgaatttctcttaggatgtgtgaataatcacattcagaaattttctattcgcgattttatcactatacatcactgagaggatcaagaagcaagttgagattgactattccttcatcaaactgtacttccacagaaaaccctaattttttagctagacttatcatattacgattttcaggcatggtaatggcagttaaccgtttgatgccatgcgccttagtatagttgattaatttcatcattaattggtgacccagtgtattaccttttaaatcagagcgtaccaagatagcaaattcagcctgttgattatcaggatctgccatagctcgagcaacaccaataatttctggatcatcgtgagggtggcgaatggcgacaaaagccatctcacgatcgtaatcaatttgtgtcatattagcgagatcgtcatgggtaaattcgctgatctcactaaaatagcgataatagagatcttctttggtcacttgattaataaaggtttttagtagaggttcatcttcaggcaaaataggtcgaataaaacaaggtttgctatctcttaaaaagaaagtttcttctaattcattgggatacgggcgaatagaaagtttttgatgaggatcgccttcgataggtgacagctccatagccacgtctaacaaagtgaaatcattacccgatactaacaacggatgtatgtcgagcctgacaatttgtggacaatctaatagtaagtgtgaaacttgcaccaaaaaatggcttaagcttaggatattcagtggttgtaatgcacttctaggttggagcttgccactttttattgcattaatgaccagataacgagctagcgccatattaagtggtggcaaagcaacggcagcttttgtttcgatttgccactcaacgcctccttctcctaatagaattagtgggccaaagatggggtcttgttcaatcgcaacacgtagctcttgggagcctgcacggtttgccatactttgtactaatagtccttgaattttcgcttgagggtaaagctcgcttacccgctcgataatggcatgtgcagccgattcaacttcattgctgtctcttaaatataacataaccccctgaacttccgatttatgaggtatatcaggagagcgtaatttcagcgcgaccggataacctattttttctgcaatactgaccgcttcttgtgcattatgagcaatccaagtaggtaaagtattaaagccataggcttccataatgggctggacttggtgtgtatcaaggcgatactgttttttgtcgagagcgtcttcaatacagcgatgggcttgctgggtgttcatttttatttctaaaggtaatgccggcgtttcctttagttgtttttggtttcggcggtactccaccatatgcataaaagcggtaattgcgccttcaggagtgcgataagtgggaatccccgcttcactaaataatttacgtgattgttgagatgaatattcgcctccccaattagtaaatagagtgagccattttcttctggggtgcttattaattgcttcaataactttttgtgctgtttcaatacttggtgcaatagcacttggtgtatgaattaagagtaatgcatcatgatcatggctatctaatagacaattcactgccctaatatagcgctctaccgtggtatcatcacctaaattaagcggattacgaatagcagatgtgtcttgcacaatggcttgcaattgttgctgagtatcagcagataattgtgctaatttgcctgactgtaaaaataattcatctacggccattgccgcaggagcggaaccattgctgatgatcatcagtttctcgccttttaatggcgtcatataactgagggtttcaaccgctgaaaacatctcatgagtatcttgtacgcgtaacagtcctgcgcgttggaaggctgcatcataagctacatcataacttggcgtatcgcctaagagtaattgggctttttgtgttcgaccactttttataactagtattggcttattacgtgatgcactacgtgaggcagacataaagcgccttgcatcatgaatatgctctaaatgcagtaatattgcactggttttactatctcttgctagaaaatccagtaaatcatcaacttggatatcttggttatcacctaatgcaataaaataggaaaagccaatattgcggtaatacgcccaatctaggatggtgttagctactgctgctgattgtgagataaatgccaatttgcctttttttacaggaaggggtgaaaagctggcatttaagccttgccaaggggctaataaacctaaactatttggacctaacaagcgaatatggtattgctggcagagtgtcttaatagcttgaaattgttctgattgtgctgaaagaacaatcacggctttacagcctgattgacctaattgctcaagaagttcaagattgcggcgatgatgagtacagataattgccaagtctggtacttgggggagtttatcaatagaaggataagtaaaaacaccagaaacagaattgcgagtcggattgactggaaagactggcccattaaacccaccactgagtaagtttttcatcattgtggttcctgctctgcctactttgtcagaggcaccaatcaccgcaattgatttaggacgtaatagtgcttcaaggcctcgctggctcatatcaactcctaagtttatgataaactgtattcaatgtagctgatttactcttcttttgcctgacgtctgtctggttttccaattaaatattgttgacgaaagtaactaaaatgagaaaaaagctgttgtgacgctaaatcatcgccgacattggctaaaatagaagcggcaacttcagcggtacaatgttgctcttctcttgctgcttgacggagcatgtagtcacatttactggcttcattaattgaaaacagtggtaatgcatcaaggtaggggcttttacgaaacatttttctcgcctctgtccaagtgccgtctagtaagataaatagcggtggcttactgtttgcaggtaactggtgataaacttttcgcgaaggagaagcatagctgtctgggaagacgacataagcttgtcgatgcggatcattaattgcatcaagtaaggctttttcaggctcggtacgtgaccataaaaaggcaagtgtatcgggtaaaacatcggcaattaattttcctgtattacttggtttcatcacttctgtatcgtacatcattaaacaaaaacggcttttcgcggtttgatgaatgatggtgtcacacagacactgtttttcaggtaataaacaaaaagtgcatcgtttaacacgaaagcctctggctttatatgggcgtgtagagatagaaactcgatattgacgaagtcgagaaaccgcattgtcatgcataacagaaagaccacaatcataaataaaggaatgaatattaccatgatccccaaaggtctactatcagttgttttttatgaaagtttatttaccgtatagtggtaggattattattatttaataaattttggtgacttatgaaggtaacacaaatccttttttgtaataatgaaaatagtattacagataatgaaataaaaaacctatttaatatctttgatactcaggtcattaataatagtagagtggatgttaatcttgagactgccaaaaatcaaataaataaactcgctaatgcagttaggaatggaagctcaaaagatttggattatttagtaaatatcatgtttcatgatgatataaaaataagcttatatgcaactaatcagctctacttgatttatccaaaattaaataactcgataagagaagatattaaagaattagtcaaattactctatgaaataaaaataaaagaggatcaagagtattttaaagaacgacctttattaagtgcaatggcttgtgaggaagcgattgctagacaaaagggaaaaggggagaatgtttttatctcagcggttgataattatttaaatataaaatgtaatgatagcgtattggccaatagtaatgaaagcgtaagtaataataatcgatatatatcttcatctgaattagagtcttgggcgtcatttcaaccctatcagtgtgatattggttcctatgaatcaatacttaaaaaaatagaaaatagcaaaggatccgcggagttaaaaaattatgtggttttagtcaataataaccattgggttgcgttattgacttataaagatagctgttttttatgtgattcattgccctcaagcaaaaaagatgaacgtcataacttattaattgaactagaaaaaaaaggatttaatactatcaatatagaatataatctacaagaaaatgtacctaatggatgtggtcttttggcgcttaattatattgatagtttacataatgaatggaataaatttaatcatgaaaaagaagatgatttaatatccacaatagaaacagtattacaaaaaacaggaaaagactttctaaacctaagttgtggtgagcaaaccacatttaatcatgatgttaggaaaaaattgattatggatacacttttttgtattgttaaatctaatgatgaatagctccattagttattgatataaaagctattttttattaataaaaagctaaatctaattttatttttaaagagagtgttttttgatataggtttatctcttactctgcgtgattctctcggtgacagttgctaaactatcatgtaatctgcgcccctattgcagttggagagactaatgaacgattcttatgaaggtaaaaacggcaaagtaaaagtgatgtatgtccgcagtgaggacagtgccgataataaacctaaaaaaccatcccgccgccctaataatgctcgtggtgatactgaccgtagtcatcgtcgtgatgataaacgcggtgataacaaattttctcgtcgtgatgaacgtggtgcaggtaagtcttcaggacgtaatccatcacgcagtggatcaagctccttacgtgataacgatagtgaaggtggtaattattctccatggaaaacgatttctcgtccgggagatgagccattaaaagagcatgatggaattactggtaaaagccaaatagatcccgaacagcttcgccgtcagcgtttagaagagacgcgtatctatggtgaaaatgcttgtcaggctatgtttaaaaaccgtccagaagccattgttcgagcttggttcttacaagaagtaacacctcgttttcgtgaagcgttaaaatggatggcggcaaatcgtaaagcttaccatgttgttgaagaagaagagatggttaaagcggcgcgtacggatcatcatggtggcgtttgtttcttaatcaaaaaacgtgttggccatgatgcacaaacctatttaaaagatgcaccaacaaaagattgtgtcttagcgcttgaagatgtgggtaatccacataatgtcggtgctattatgcgtagctgtgctcattttggtgtgaaaggcgtcatttctcccgactcatcagtgctagaatctggtgcagcagtacgtaccgcagaaggtggtgccgagtatattcaaggaattgatgctgataattttgctcagacattagagcagtttaaacaggctggctataccttagtgacaacctcaagtcacaaaggaagtgtgccactagcaaaagctcaattacctgaaaaaatggtattaatcttaggtcaagagaaggatggcttaagtgatagcacgttaaaacaaggggatatgagcatttatattggtggtacaggccatattgaaagcttaaatgtctctgtggcttctggcgtgttattggctgaatggtggcgtcaacatcacggctaattatttaattgttagatgatttaaaaatcccgctgaataatgaactgcagtcagttcaccatgttcagcgggatttttctttaattaactaatcaattcattaatggttatttacccggtgagaatggcggtttagcaaaccaaacaaccaccagcattaaaatgaatattcctgccgctagccagaaaatttcattcgctgaaataatcagaccttgttcagtgattgttttagctaaataagccgaggtttgttcatcagaaagccccaattctctcatctgttgaaaagccaattgtgcatcgggatcgagtggattaattttttcaacaaaggtttcatgatgtaatgactccctttgtgtccaaattgttgtcgttaatgacgcgccaattgcacccgctaaggttcttaaaaaattagataaactggatgccgaggccattttctccggaggtaatcccgataaagtcatcgtggttaatggcataaagaaacatgctacacctaaaccttgccagaattgtggccaagcaactgtggcaaaatccattccgggttcaaaagtataagctcgccaataaaaacataccgcaaacataataaagctaaagctaatgatatagcgtaagtcgacttttccaccaaattttccgatgattggtgtaatgatcagcggtaataaaccaacagaggctgcagctaaacccgcccatgttgcggtataaccaaagacttcttgcaacaggagagggagcaacacaatagtaccgaaatagatcatataagcgagactaagggttaaacagccaatagtgaaattgcgacttttaaacagagaaagatcaataacagggtgttcgtcagttaactcccacacaattaagaaacttaacgccactacagcaataatagtaagtacaataatttcagttgaattaaaccaatccagctctttaccttgatcaagcatgatctgtagtgcaccaacaccaaccaccaatagtacgagaccaatggtatctattggtttaatttccgttttggtttcgcgacccgctaatgtatttgagatgcacataataattaacacaccaaaaggtacgttaataaagaagatccatccccaatggtaattatcactgatatagccacctaaaatagggcctaaaataggtgcaacgacaatggtaaccgaccataacgctaatgccatattgcgttttgctggtggatagttattcaatagcaaactttgtgataacggaattaaggggcctgcgactaaaccttgaagtacacggaaaaagatcagcatttctaaactttgagaaataccacacagccatgatgttaaggcaaatagtgctgttgaccacataaagaggcgtacttcaccaatacgttttgccagccagccagtaataggaattgagatagcatttgcaacaccaaatgaggtaataacccaagtgccttgagaatttgatgcacctaagttacccgctattgtcgggatggctacgttagcgattgttgaatcgagaacttgcataaaagtggccagcgcaagtgcgatggtcattatagcaagttttcctccttgtaagggttctttaatcacctttacacctcgctttatcatcctgcattttgttcaatgatttcattaatcaatgaattgatttctgacatatcaatagtgagtgcatcagtatgataagccggtgcttgacgttcgctctgtgataatacttttccatcaagattaacggtatccacagtcacttcagtggataaaccgatacgtagcggtttttctgcaacttctttttcatcaagggaaatacgtaccggcaagcgctgaactacttttatccagttaccactggcattttgtgccggtaatagtgagaatgcactgcctgttcccatatctaatccctgtacacgaccatggtaaataacttttttaccataaaaatcagtggttattttcgcgggctgtccgatacgcatattggccagttgcgtctctttaaagttagcgtctatccacatacctgtgacaggtacgacggccattaacggtttacccggtgcaacttgtgcaccaacttgaacgctacgacgtgagacataaccttcagcaggacttagtatttttgttcgttgtaaagctagccatgcattacgcacttctgttgcagcttgtaatacagaaggttgttgtgcaataggcgtggttaagataatggcttgattagcattatattgctcttttgctacatctaatgccgcttttgccgtggcaacagcttctcttgcatgttggagttcttcttttccaatgacatttcgctcgcctaatacttctctacgacgcagatcattttgcaattttgccaattcagtttcacgtaaaacaatattcgcttttaattgacgaccattgatgatttgctgatgcatttgacggacactatttgctaaagcggtttttgctttatctaatgcaagtatttcatcactatcatctaattggactagcggttcacctgcttttacgtagtctgtattgtccacatagacagtcgttaccgagcctgaaatttgtggcataaccataatttgattgcctgttacgtaggcattatctgtggtttcatgatgtctaagaaccataaaccagtaagcggtataagcgagccccgcgagaataaagataaaagtcagtagcaataaaacatttcggcgagttcgttttttattgcgaatgggagcctgaggtggatttttttcctcatttacactcatttagaagatctccataaaccagaaaaaagcattatatatgtttccagaataaaatccggaaacatatatattgggcttatattagaataataattagcacgaaaggccaattataaatgtgaatgaatatatttgtttatcaattcatgttgtaaatgaggttggcggtatttggtcaggatatcgcaatgcctcttgctcttaggctacgtttactagatgtaatggtatctagtaaacggagtctactttcgcacaaatgagtggcgagtagttctacggctttgtccgtatctctcgaacgaagtgcgacaaatatttcacgatgctcatcccacgctggattagacggcgctctatcaagccatcgtgctcgcgaaagcctacgtagggcatcatttatcccttcaataataaatgcgttattacaaaggcgtgccaactctctatggaatcgtgttccagcattttccatgctctcttctggtgaatctaccgtggtttctttaagcaggcgttccaaattgttcaactgttcttcggtgatctggctgactgaaagttttaatgctgctacctccagtatttctcggtaaatacataattgttcgatttcatcggcatcgattggtgccactaaccaacgtataccatcacgacatataagtccctctgattccaacttttgtaatgcggctcgaacgggagttctcgatgcgttaaatttcgcttcagcccagcgttcagttaaccgttctcctgggcctagttccatgttgagtatcagttttcttaattgtttttcaacctctaacacttggctcataacggcaatactctcctaaaaattgacagtaaaataaattatctatatggtataccaaattggtataccagaaaagaatgtttctatgactcaattatataacagcttttggcgtcgaaatctgctcgtttgctttattggttctttttcaactgtttttgcaatgaccttgatgttaccgttcctccccctatatgttgaagagcttggtgttcaaggtcacgccgccattgtccaatggtctggcgtggcattcagtgcaacgtttatcactgctggcttaattgctccagtatggggaaagctcggtgacaaatatggacgtaaatcgatgctcgtaagagccagtcttggtatggcggtgaccgtctcacttatgggaatggtaacaaatatttggcaacttgtcggtctaaggctattagttggtttggcggggggatactcatctggagcaactattcttattgcagtacaagctccaagagagcgtgttgcttgggcgttgggcattgtttcatgtggtgtaatggcgggtaatcttattggccctctagctggaggttggttacctgacttgttcggtattcgaaacacgtttttctgtgccggtgcactgatctttttgtcctttatcatgacccttacgcttatccgtgaagatacgccgaaatacataaatactacgacaaaaatgcaagtgagttggtcgcagttaccagcacgatttgtgatagttagcatgctttgtacggggttgttgctgatgctggccaatatgtcgatagaacctattattacagtttatgtgcgtacactcgttaatgatcctgctcagataactagggttgcaggttatgtcatggccgctgctgccttaggtagtattatttcagcctcttggcttgggaaattagcagataggatagggcatttgcgtattatcacgctggcactagctatagccggtttattgctgatccctcaggcctttgttacctctggttggcaacttattattttacgttttcttatgggattagcattggggggattgttgccttgtattgcggcagtaatacgtcatcacgttccagaaggaatgataggcagtatccttggctattcggtcgcagcccagtttgcaggtcagttcatcggcccgttaataggtggcgttattggtggtcatataggtatgcgcgcagtttttctggcaactagtgttgtcttattgttgggagccgcttggaattttaaattacatcgtaattcagttatacgctgatgaacttcgttcttcttcacctgtatatttcggagattttatgacaacacaattcaacaataacaataataatatcgataaaaatagtgctctgctggtaatggattttcagacgaccattcttaataattttcttccacaagatcgtgctgaagatgttattcgtaatacatcatcattaatttccgctacgcgtgcagcaggcataccgattatctatgttagtgttgagtttcgtgaggggtatcctgaggttagtcaaaacaatataattttctcatcgattaaagacaatggaatattaatcaccaatagtgaaagttccgctattcatgatgatatttttccgcaggaaaatgaaatcgttattattaaacgtagagtgggggctttttcatttactgagcttgagatggttcttcgtacacaaggtattgaaaccttgatccttgcaggagtcacgaccagtggcgtgattttatctacagttagtcaggcatttgacctagattatcgtctagtgattgtaagtgattgttgtgccgatcctgatcatgacacacatgtttttttactcgagaaaatcttgtctcaacatgctgttgtaaccagttcatctgaaatatcaaaatattgggtataaatagactaagtagccaatgttacatagatcttgtcggtagtatgatagattaaatatcagacatgattgagtgcaagggctggggaatattggcttttggcacagagcgacctgtcagatttatgttagctctgtgccatagctagtcaggtcaaatctgagctaatacagattagatcaataagtttattgatagtgatggttattcctgctgattatccgctaatgtatcaagttgtaataataatttacgcattagggtttctagctgtttttgttcaccttcatctaatactgaccaaattttctttaaacattcgtgctgtggtggtaataagctatttaaaaactcttctccagcatcagttaaatgaagatgtagacagcgacggtcattatgactttcacgacgctcaatccatccttgtttttctaattcatctgcaatacgagtggcatttgttcttgatgagcctaacgccgcactcaattctgatggttgaatactacgattttccgttgtatctaaaatcataagtgccataaataatgtctcgttaatgccctgagactttaacatattattacgactttcaagaagtttgctctggacgtgcatagacaggcgagttaacaaaatttcttggtaaggaatatctttgttaagcgatttctgttgtgtagcgcgagtgtttagtagttcttctgttggcgtaaatgagctttccatttttagacaccttgttagtttcgataattaggataacgttgttatcaacatgttaaatggtatattaaacacacaatttagcaatttttattatttatagtcactatgtttttttgattatgctacctgattcataaattttttgaatgataacataaaaaaatcactaggtgcttatctatttacaataagttataaaaatcaatttatcccttatttacttatgaataatagtctatttaggaaaaaatggatcgatttctacgataaaacacgtaataaatttattttacactataatgattctattgttaataataccacttagaaactatgccgtttatgctatattgatataattgatatgtatttcttaataaagaatgagatgatgatatacataaatagtaatcacgctgttaaaacatttacgttttgttctgtttagaggggtattgctgacataaaataccccttttgagataagttttattattcagattggatcactggatcatttttataaccaaataaccaaaccagtaaacctaataagccaatgattgcaccggcgctggaaacaccaatccagccatattggtgataagcgtaacccgataataaagagcctagggcgcccccgataaaatagctagtcatataagcggcagtaagccgatttcgggcatcaggtaaaatacggtagatagtgctttggttagtgacatgaacaccttgaacggctaaatctaataaaaccacaccaataataaaactaatcagtccaatccattgataataaggggcgataacaataagtccccaacaaatgaagagaagaattaaacctgaagtagtcgtttttttacctttgcctttatcaacccatacacccgctttacctgccattagtgctcccgcagcaccgacaagtccaaacaagccaataactgcatcggaataattaaagggatcagaagcgagtaaaaaagccattgatgtccacagtaaaccaaagtgggcaaagataagtgcaccaatcagtgagcgggtacgtaatactggggtcgtggcaaacaatttaaaaatagaaccgagcagttgaaaataatttaaatttgtttgacttttataggtaggtaaacagcgccatagtgtaatagctaaaatagctagaaaaacacttgctagccagaaaatgccctgccaattagtaaaggaagccatcagccctgacgctgttcttgccagtaaaataccaagtaaaagcccactcataatagtacctaccgcttttcctcgttgatgaggtgcagcaagtgtagcggcaaaaggaaccagaatttgggcgacgaccgagaacatacctgatagggcagtaccaattaacataagccaaatattaggtgccattgccgtaattaataagccgctcgctgaaatcagcgtcatgataacaatcagtgaacgacgttcaaaaatatcgccaaggggaaccaatagcattaaacctaaggcataacttaattgtgctgtagtgacaataaagccagctaaagtggcagagatatgaaaataatttgcaattgaatcaagtagcggttgtgcataatagttacttgcgacaaccatgccagtggcaacggccataagtaaaataaggcctttactaagagaggtttgtggtgctgtgttttccataatactgatcacaaattatttgtaaggtaaatgatagtaacatgagtcatttttttgcggaaagaattactgtgatagcaatgttcaatcaatcgggcatgaaagtttttaatctatttttataatagattaatattaaaagtaaaatgtgatttattctcggcagataaccgaatatttgcattatttattatgctaaatagatgaatagccccattccctcactgtcctgattagacaagtactaatccatatagtaaccaatgttattagttaattatatcattaatattaaattatttagttattctgttttaaatatagctcatttttagtttagttaacttttttatggtttagatcaaaaaaagctatgtaatgataataattatcattaacatgattgtgttgttaaatgtatttttagctatttatttgcgtattaataaccatataaaagatactattatgaactttttgttaattaagcatgagcctcattttcagggaatgggggccgtttcattttcatctcatgcgatttttttattactcactacacttgcttcgtttaatagcgttgcttcacaaagcacagaaaaagcatcacagactcaacaatctgaaactgtggtgcttgatcctatttatgtttccggaaaattaaattcgagtgttgaagcaggaagcacggctttgacattaaaagatatcaatagaattcagccaaataatatcgctgaattggtagataaattaccagggatttcttcatctggctcgccaagacctggtgggcaaactttaaatatttggggaatgggcaatccggaagatgtgaaaatcactcttgatggtacaccgaagacgtttgaaaaatatcgtcaaggttccatatttatcgatcctgaattaattaaacgccttgatgtcgataaaggaccacataatatcacccaaggaaatggaggatttggtggctccgtacggattgaaacgaaagatccggatgacttactgttacctgatcagcatattggtatgtttttaaaatatggacatcataccaatgataggcaaaatcgttatagtggtgcgatatatggcaagctaatggatggaacggctgacggtctattttattttaatcgtcgtaaaagcgatgatttacgtcgtcctgatggcactaaatttggttattcacaatcagatcaagattcgtttttaattaaaaccaatgtctatttaacagacgcacaaacattaactttatcagcatcaagatctgtcagtgatggctggacgccttgggctgccaagcgagatgaactggcaaaaccgagtcaatatgatgttgataaatatggttttgatggagcgatgaaacgtaagttagtttatcgtgaccaaaaagatgacactgtgagtgtgaaatggaatattcagccaattgattctgacctgattaatttcacattgacttatggttattcaaataccaaacagaatgataaacgccctgataatgcgagttcttatctaagtagtagtatgggtaaccaaagttgggttaactataaaaatcatcaaattgaagtgaaaaatgaaagtaccgtgatgcaaggagctaccgaacatgtgattttagtaggagcgcgttggcaccgtaatgatcgtaatgtgttaatgtttacgcgggataaagcgaaaaatccaaattataattatggctattatgcaccaccttatatgccagaagggacgcaaacaaccacgagtttttatcttcaagattcaattagttatcgaacactaaccctcacgcctggtgtgcgttatgatatagtgaaaaatcaaggagcagggagtcgagcgaaggtttatcaagatcctaatccctattacggtcatgattatagtgatgtaacttatcgtggcattacacctcatttgggtattttatggaaagcgacccccaatattagattttttggtgatataactcatacatggcgtgcgccgttaattgatgaacaatatgaagtgcaagccagtatctctagtttgacaggcacgagtcgccatttagataaagagaccgttaccgcaacacggattggcgccattgttgattttgaaaatgttttccaacaagaagatcagctgcaacttcgaagcacattttttgatactcgtgggaaagatgagatattccgtcgtcgcggtgtctattgtgaaagcggaaaagtaaccggaaacaatggaagttgtcctccttcccttggaaattatcgcaatttacctggctaccatattcaaggtatggaaatagaggcattttatgacagtactaatctctttggtcgcttagcgtattcgacaatgaaaggtaaacgcgatcaatctcctcgtgatccgtggtttggacaaaaaacatggattgcagaaattcaaccggatgcattacatgccacccttggaatgaaaatcccacaaataaatatggttgcagggtggacaggggactttattggcgctcaacgtcgttcaccgatggatgctgatccggctgctacttattggtcattaccaaaaagtaaaggctatgccattcatggactattcgctaattggaaacctgcttttatcgataataccgagatacgttttactgtcgccaatttatttaaccgtgattattacccttatttaggtgagtcggtatctggtactgggcgagattatcgctttactgtggttaaaagtttttagttagacaacaggacaacagccataagataaaaaaaagcagagcatattaataatgctctgctttgacgttatttaaggattatcactattaattagccgctttacgcgcttcttctacccagccatcaaaggttttttgatgtgctttgatccacgcgttagcatgacgttcaatatctgcttgtgatttttgaccattatgcatacgtaagttttgggcgttgatatcagccactgaaactttcattatttcaaataatttagcagcagcagggttggcttcggcccattttttatttgccgcgatatgcattgtactcggtgggaaaccgtagtttttaccgtttggtaaggttgtatcggttttgtcatctcccggtaatgaagagaagggaacttgtagccaaacgacatctttacccggctttaatacatcacttatccagtatggtgtccaagtataatagaagataggtttaccttctttataacgagtaatggtatctgccatcattgccgcatagttaccctgattatgggtgactgatttctctaaatcataggcttttaagtgattattaatggcttcttcacaaccccagccagggttacaaccggttaaatctgcttttccatcaccattggcatcaaataatttggcaattttcggatctttaaattgctctatattagtgatgttatatttttcagccgtttttttatcgattaagtaaccttgggctgcattaaccacataatcacctttacgataaaatgtgttatcgccacctgcggcttcatattgtgagttatgcaaaggtacccaactaaccgccataaaagtggcatcaccattagcaatagaagaataagctacgttgtagtcaacttctttaatgggttgcactgtgtagccgagtttttcgagtgctttattgacaatgagtgtctgaaaagtttcttcagaaatagtactttgtaccggttgaaccgaaacccctttaccgggtaaatcagcagcggataactgagtgcttatcagtgtggcggacaatactgttgcccagagaactggattacgcatagtttttccttctgttgtgatgggtaagagataatagtcgctgtgtcgtgctactgttatctcttatattaattgaataaatatgtttgattgttagttaatcttattgccagtatgagttatgcggcttttttaccaaacaggcggcagatcaaaccaatcgggcctgtcatataccagcgtctattacctttcaggcgactattttggcctaaagattgagttaagcggtcaagaataatcgcgaggatcacaataccggcaccacctacagccgctaatcccatatctaggcgaccaataccacgtaataccatttgacctaaaccaccaacggctatcattgatgcgataacaaccattgacagtgctaacattaaggtttggttgaccccagccataatcgttggcattgccagcggtaattgtactttaaacaacatttgtcgaggatttgccccaaatgattgagccgcttcaatgagatcttccggtacttgtttgatacctaaaatagttaatcgcactatcggtggtaaggcgaaaataatcgtgacaactacaccgggtacgttaccaatcccgaataacatcacgataggtactaagtaaacgaaagcgggggttgtttgcatggcatctaaaagtggtctgacaatttttgatgctctgtcactatgtgcaagccatatccctaaggggagaccaataatcaggcagaatagtaatgaggtcagcactaatgcaagggttatcatcgcttcagaccatgcaccaatagcaccgattaagatcagtgaaataaaagcgcttattcccatcaccttacctgaaagttgccatgcaatcagtgaaaataaaataatcgcaacaggtgcaggcattgaggtaagaaagttttcaaagccacctaatactaaatcgactggaacgcgtatcccttggaaaataggacgaaaatgcagcacaatccagtcaataccatccgttacccaagaatctagtgggatcagcgtatgattaaatggatccataatattaaagtgatcaggtgtactttctgttggcatggcatctagccaatcagtaccagaagagagatcactgccgtcagtgccactccctgtaccccaaggatcagcatcagctccaccggtatcaccgccagcgctactactccaagggtcggtatcagtagtgttgctatccgtggttgcccaaggatcattgtctgtatctgtgttgttatgcgtttcttgcgctgaattttgtgttgtattggcgttttctgttgccgcttcttgagtgtccgtttcccaaggattggcttggttatttgtcttactcatttggtgtctccttatccagtgcttgtaacaacattcctttcgaaattaaaccgatataacggtttttttcatcaataacagggatcgcacagggagattgcgcaacagtagaaatcagttcatttaatggtgtatcaccattaatcgcacaaggttcagttaaaatagcggatccaataggttgcttcgcttttaatgcttcttcaagagaagtgacagaaacaatacctgcaaatttccgtcctcgctcaattaaataaccaaagtttctatcttcatcttccagtacttttaatgctgaacggggaccaaaacctggcgcaatatgcagtagtgtttctgggcgacgtttagcaatatctttagcgctaaatacatgactgatatcaacgccacggaagaaggtacgtacataatcattggctgggttattaagaatttcatcaggggtaccgatttgtaccaccacaccgccttgcataatcgcgatacgatcaccaatacgcatggcttcatccagatcatgagaaataaacacaatggtgcgttgtttatcaccttgtaagctcaataactcatcttgcatttctgttcggattaatgggtcaagtgcggagaatgcctcatccattaataagatatcaggatcattggccagtgcacgagcaagcccaatacgttgtcgcatcccaccggataactcatccggccaagattgagcatgagagcttaagttaacttgctctaatgctgccatggctttttcatagcgctcttctttgctaatgcctgcaagctccataccaaatgctgtattatcgagtacattcatatgaggcattaaagcgaatgattgaaacaccatactgatttttttacgtcgaacttgtcgtaaatctttatcagacatggtggtgatgttttcaccatcaataaggacttcgcctttagtgggatctatcagacgattgagaaggcgcactaatgtagatttaccagagcctgataatcccatgatgacaaatatttcgccttcttcaatggccagattggcattttgcacaccaacggttaaccctgttttatcaaagatttggtctttgttcataccagatcctaataattcaaaggcccgtttagggtgctcaccaaatattttatataggttttttacttcgagtttaattgccatgcaatatctattttcctatttaaatatgaaaggaataaattaaatgttaataaattagtttgttgtttttcctaaattgagatttttagtaggggaattaccctatcataatgaacaagcctgacaaccctatgttaattataattaaacaaataattttgtgatttttttaggttttttttgataattaatatttaaataaagtaaaattatagaaaagaaagaagtcaaaaaaaccatactaactgtatgaaataacattatttttattcagatgttaattttaattatcatcacaatagaaataacaacaaaataaaaaaatgtaaaaagatactgataaaataaaaatagaaaaaaatgcattaacattaaaaaatcttatgttttttgaggggtgatcttaagttatcgataactagtcataaaaatcattcgtaaaaaattgataattctggttaatggaacggtaaaaattacacaatcaggttgtttttcaagcaaataaaaaggcactaaaaaataagttttatttttcagtgcattatattaattgattaattcataattaatatgaatgtattctgttttttgctgtagagggttagctagaaatcccagtcatcatcttcggtattgatcgttttaccaataacataagaagagcctgagccagaaaagaaatcatgattttcatttgcatctggcgatagtgatgaaagtattgctggactaacattagttatttcatctggaaatagtgcttcataacctaaattcatcagcgctttattcgcattataatgaaggaatttttttacatcttctgtccaaccgacagagtcgtagagatcttctgtatatttaacttcattatcatataaatctaataataatgagaaagcaaagtctttaatattttgtttctctaatgatgatttatttaataactgattttggaatttatagccaatataataaccatgcacagcttcgtcacgaataattaaacgaattaagtcggctgtattggttaatttccctcgacttgaccaatacattggtaaataaaatccagaatagaataaaaaagactctaaaaatacactggcaatttttttctttaatggatcactatcttgataataacgcagaataatatctgatttcttttgcaaataggtattttcttcactccaacgataagcatcatcaacatctgttgttaagcagagtgtcgaaaatatcgagctataagagcgagcatgtaccgcttccataaaacagatattcgataataccgcctcttcatgaggagtctgagcatcaggcattaaggttggtgccccgaccgtattttgtatcgtatcgagcagtgtaagccctgtaaatacacggatagtcaactgtttttcagcttgggttaaggtattccatgaaggtatatcattagaaagtggaattttttcgggtaaccaaaaattcatggttaaacggttccaaacttctaaatctttttcgtcttcaatacgattccaatttatcgcattaacacgacttaaataagatgcagacatagtaacactttccttatcattattattaaagggcgcatgaaacacagccttttatttctgtgccggctaatgctgtttgtctaatacgaatgtaatacaaggtctttatacctttacgccatgcataaatttgtgctttattaacatcccttgtggttgcttcatcagaaaagaataatgttagcgacaatccttggtcgatatgttgtgatgcttgggcataggtatcgataattttttctgcgccaatttcataagcatcttgataaaaatgacggttttcattggtcataaaaggggcggggtaataaacccgaccgattttaccttcttttcttatttcaatcggtgccacaatggggtgaatactcgatgtagagtgattgatataagagattgatcctgttggtggtattgcttgtaagttttgattataaataccgtgagtcataatcgagagcttaagtttttgccaatcttcttgggttggaatatgaatattggattggctaaatagctggtggactttttgggttttaggtaaccactgttttgataaatatttatcaaaatactccccagtggcatattttgactgttcaaaccctttaaagcgctgtttagtctctatcgctaattggttagaggctaaaagggcatagtatgttacggtatagaaatagatattggtaaaatcaagtccttcttctgaaccataataaatcccttcacgggctaaataaccatgtaagttcatttgccctaagccaatggcatgagatgcttggttgcctttttcaatagaaggtactgattctattttagtcatttgtgccacactcgtcagtgctctgatggcaacatttacggtatgcgcaaaatctggtgagtccatcgccatggcgatattcattgatccgagattacagctaatatcatgaccaatttgtcgataacttaaatcaggattgtattcactggcactatttacttgtaagatttctgagcataaattgctcatattaattcggcccgcaatcggatttgcgcgattgacggtatcttcaaacataatatagggataacctgattcaaattgaatttcagctaaagtttgaaaaaatgcccgtgctttaatttttttcttacgtatctctgcattgttgaccatttcagtatatttttcgctaatactgatttctgacataggaacgccatatactcgttctacatcataaggtgaaaatagatacatatcttcgttgcgtttagctaattcaaaggtaatgtcgggaataacgacacctaatgaaagcgtcttaatacgtattttttcatcagcattttctcgttttgtatctagaaaatgatagatatcaggatgatgagcatggagataaaccgctccagcaccttgtcttgcgcctaattgattggcatatgagaaggcatcttcaagcattttcatcaccggtactacgccagacgattggttttcaatgcgttttatgggggctcctgcttctcgtaaattagtcagtaagaaagcaacacctccgccacgtttcgacaattgcaacgcagaattgactgctcggccaatggactccatgttgtcttcgatacgtaataaaaaacaagagaccaattcgccacgctgtttttttccacaatttaagaaagtaggggttgcaggctggaaacggccactaattatctcatcgacaaggtgagtggcgagtttggtattcccctgtgctagggttaaggcaaccatacaaacacgatcttcatagcgttcgagataacgctcaccatcaaaggtttttaaggtgtaactggtgtagtatttaaatgcacctaggaacgattgaaagcgaaattttttgctataggcatgcttaaaaagctgtttgataaacgggaaatcgtactgctctaatacttgtgcttcgtagtagtgttgttgcaccagaaaatcgagcttttcttttagatcatgaaaaaacaccgtattttgattaacgtgttgacgaaaaaaatggtgggtggctaatttgtctttatcaaactggatattgccttgctcatcatagagattgagcatggcatttaaggcgtgataatcgagttgttctatagagtgggtcatattttttatctcattcactttttagtcattatttgctagctgaccaaaatgtgcttaatccggtttttacacgtttaacatcttcaggcgtaccaagtaactcaaaacgatagagaaaagggacttggcatttttgtgcaataatgtcacctgctaagccgtaagcagagccaaaattggtatttcctgaagcaataacaccgcgtattaattggcgattttcaggaatatttaaaaactggatcaccgctttaggcactgcgcctttaacgccaccgccaccataagttgggcagagcaacacaaaaggttgtgtggcttgtagtggttcatcctcttttatccttgtcgcttgtagattaagtttttgtacgaagcggtgacaattttctgagcgactagagaaataaattaaaggggcagtcgattgcataagttgctcctttagcgcgctatttgacgaattttatctgggcagaagccagaccaatgttcgtcaccattaacgacaactggtacttggcgatatcccatagaaactatttttgctaatgcttgagtgtcttgggtgagatcaaccgcagtgaaaggaattttttgttgttgtaatgcgcgctcggttgcactgcattgaacacaatttggtttggtatagaggatcacagacatagaataacccttataaaaatgtgaatgtgtctgctcacagtcacaatgaaaagtacttaaatactatatataggtttattctttttcaaccacactagatatggtgttttttatttttgataatgattattattaaaattaagcagttagcagatttattttattttcttatcgctcatttgagcaatttttattaggtatagtagaaaattagatgattgatttacttacaaagcatgttttaatcttgatgatacagacaaatcaatagagaacacattatgtaccaagattatctcaatacgccgaaaggttttccaaagccttatatatccattactgcagatgatgatggcatcaccagccttaactttgttagtgaaaaagaggcgttagttaattcaaatgccataattgacctgtgtataaaacagttaaaagagtatttttcgggtaaacgcaccctattttcagtgccactagcgcctaaaggaaccgaatttcaaatacgcgtttggcagactttacagtctattccttatggtgaaatttggagttataaaaagttggcacttacattaggttccgtcaactattgcagagcggtaggaatggcaaattcacgtaacccaatctcgttaattattccttgccatcgcgtcattggtcataatggtaagttagtaggctatactgggggacttgatatcaaacgttggctattacactatgaaaaagtggatattgacgaatagttcatattgtaagtattaagcactatttcttaagtgattaatggcttaagttatgggatttgtctgaataataatcgtttaacagaaaaaaaatacgcgtttcgtgatctagactgtggacagcgaatcatcatttttgttttactatagccaacgcaaaacgcttgcgtttattttctattttaaaggtaaacttgatgtctaaattaaaaggtaacgttaagtggtttaacgaaactaaaggttttggttttatcactccagaagatggcagtaaagatgtgttcgtccacttttccgctattgtttcagaaggttttaaaacacttgctgaaggtcaaaaggtagagtttgaagttactgacggcgcgaaagggccatctgctgcaaacgttgtcgctatctaattaacgacttctccaaaagtaaaaaacgtttttgaaatgacccccaatagttggacaaccaattattgggggtctttttatgtcaaatacaggggggatttaaacatcatcattgctacttagggtgactatgcttgccacactgcataactctcgctcgttttgatgatgaaaaaagacttgagaaatttaaagaggagcttgcgtatctagctgcgggataaataccgtggttgaaagttttttaaattattaaaatcaagaatacatcatagctatcattttaaaatatcaatgaatgtattgataaaattggctaatttattgagtaataccaccgggaacaaaatcaaattaaaaggcctgacattggttgaatattaagttcaggccttataaatcgcttaactaaaagagtacaactttatgattaacggtttttatcttgttaaagagactacatttcacggagtagccagaatgcgaatgccgtcatcagaaacgagcccgctaagtttgcccccatggtgcctaatgcccagcctattcgtccttcattaaataaggcgaccacctcaacggaaaaagtagaaaaggtggttaagccaccacaaaaacctgtggtaagcatgattttccaaataggatcaatattgggagccttactaaaccaagcaatgccaaaggcgataataaaggcaccaatacagttagcgaccaaggtccccgttgcaaaatggggaaaaagagaattgaggcggtagctaattagccagcgtagtacgctacctaaaccaccgccgataaatacagctattgcaatgttaagcataagagagattaatcgttatttaacctcaatcccttgagcttgaagatcagcatgataagacgaacgaacaaatggtccacaagcggcgtgggtaaagcccattgctaatgcttgctctttcatatattcaaactcgtcaggactgacgtagcgttgaacaggaagatggtgacgactgggttgtaaatattgccctaatgtcagcatcgttacaccatgtttacgcagatcgcgcatcacgtcaataatttcttcatttgtttcacctaaaccgaccattaaccccgatttagttggaatatttgggtgggcttgtttaaagcgttctagtaacgttagagaccattgatagttcgcaccaggacgcacttgacgataaacacgaggtacgttttctaaattgtggttaaagacgtctggtggtgtgtcagtgaggatctctaatgctttatccatacgaccacggaaatcagggactaaagtttcgatgcgaatattaggatttttttcacggatagcggtaatacaatcggcaaaatgttgtgcaccaccatcgcgtaggtcatcgcgatctactgaggtgataacaacataacgtaatcccatatcttttatcgtttgggctaatttaattggctcttggggatcgggtgcgttaggacgaccatgagcaacgtcgcaaaatgggcaacgacgcgtacagattgcccctaagatcataaaggttgcggtaccgtggttaaaacattctgcaagattagggcatgaagcctcttcacaaacagaatgcaggccatttttacgcatggccgctttaataccttgaattttacttgaatctgcgggcaactttattttcatccactcaggtttgcgtagcagttcttcacgttctgtaacgattgttttaacaggaataagtgccattttatcggcgtcacgatattttacgccgcgttccatctgaataggtttactcataattgtgccagttccagttatctagggtgattaacacgatgtgactgaggtaatcagggttttaaaaaaaaatgataaatgttaaaaaaattatagcatttttattgctgtggttggaatcccagttgtgtacaaaaatggttgattaataatgatgccacttgttccgatgttgcattaggcgccaaatcaaccagttgtgtcatttttagatcaggataaccacaaggatttattcgcgtaaaaggagataagtccatatcaacattaagtgctagaccgtgaaaagagcaacctttgcgtatacgtaatcccaaagagcaaattttatcaccattaacatacacgcccggtgcatctgcacgagcatatgcgtctacattaaattctgcgagtgtgttgatcacagtattctctaaaacagtgactaattggcgaacgccaatatggttacgttttagatcaagcaaaacatacatcacttgttggccagggccgtggtaggtcacttgtccaccgcggtcagattggatcaccggtatagagcctgtgtttaaaaggtgttctgctttacccgcttgaccttgggtaaaaacctgttcatgttgaaccagccaaatttcatcaggtgtatgactttcccgtttttccgtaaactgatgcatagaatcagaaaccggtaaatagggtttcatacccaattggcgaataatgattgttttatcttgcaccgtgaaaatcttcatttgtagcgtaattgtgaaaggcagtataacgctccaacaaatgaactaccagaatgagatgagattattgcttcagtttgtgtttgataaaggaatattgataaaaaaacgacgtagtgagaagggggatagatgtgattaaccaagcagtgcttaattggcgattaaccccaattaggcttttatttaagtgagacttactaaatctaggtgacaaatcaataacgaaataataagaattaatataagaagtaaggtgaaagagaaagataaagagaagatactgcgtaatattgcttcttaagtacgtctaatgccccctaatagggtaagggggcaaatagaaaaaaattataacaccatgcgaacaagctctaattcacctaactctttatagagggtttctacttgttcaatatgcgttgcgttgatagtcaccgagactgagtgatagttacctttgctacttggttttactgaaggtgtataatcaccgggtgcatgacgctggatcacttcaacgacttggtcaactaattcgggtttagcatgacccatgactttgtaagtaaatgagcaagggaactctaatagttcgtttaattttgttttcatcataatgtaatccttaagacaacaggcgatgttgttttaataatctcttttacacctcatcagcacaaataaaaagcgcattcctcctataatgaggaatgcgatactgatagttagggtaaatatagaatgggtaaatgtgtttattccaatatcgatataatctttatatatggacacatttatccttttcaagccttaaccaaaccaacgtgaaaataataatttgatgtaatcaatcaagcggctgaaaatgccaccttctttcacttcattcataacaacaagtggacgttgttcaatgacttgcccatcaagttggaaattaatggtgccaaccacttggtttttactgactggcgcatgtaattcaacattatctaatacataactggcctttagatctttgagtcggccacgggggatcgtgagataaacatctttatcaacccctaattgcactttatcagtatcaccataccagataggttcagcggcaaattctttacccacttgcagcggttttaccgtttcaaagaagcgaaaaccccaagtaagtagttttttactttcagcatcacggcctttagatgagtgtccccccatcacagcagaaatcaagcgcatatttccttctgttgcagaggcaacaagattataacccgcagcttcagtatgacctgttttaataccatcaacattgaggctagtatcccaaagtaaaccattacggttagtttgacggatattattgtaggtaaactctttttctttataaatggcatattcttctggaacatcacgaattaatgcggcgccaatcaatgccatatctcgtgcactactgtattgcccaggtgcatctaaaccatgtacagtttgaaattgtgtgttttgtaaacctagacgcttaacatagtcattcatcatagtgacaaaggtatcttggcttcccgcaacataagaggccattgctacacaggcatcattacctgattgtagattgataccgcgtgttaattgtgaaacggtgactttatcaccgggttttaaaaacattaatgatgagccgcgaaatacagggttgcccgttgcccatgcttcttcaccaataggaacaatatcgttgttcgatatttttcctgcacgaatggcttgacctataacataactggtcatcattttggttaaactggctggatcacgacggacatctgcgtttttttccgcgaggactttcccagaattatagtcgataagaatataggattcggcttcgatattaggaacagcgggtatcattgtttttaatgtgtcatcagcaatagcatgatggctaatagctaataatataaaggttgcactaaatagacgtgttcttagtaatttcactgggcgtgtctgtttcattctgtttgtctgttccggaaattcagggaaaataaataaaagttgataagaaaaatatcagcaaactcaggtgattctatgcctgaatttgcttttagaaaaagagtttttacgaattattaccctttattggctaacaataaacccatcgatatttttactttgtttcaaagcactttttattgtttcggcttgcgtttttgatgagtaggggcctaattgcactttatgtagtccatcagttgtattaatgacaccttgggtatttaaagcattggttaattcagttaaccatgtttgtgcattagtttgattacttaaagcacctacttgtacatagtagccttgcgctattgcgctagatgaagatactggctgtggagctggagctggagctggagctggagctggagctggagctggagctggagctggagctggagctggagctggagctggagctggagctggagctggttgagtcacagttatgggagacggtgctgttacagagggttggggagccattgtcgatggctgagtattaaagttaggacgctcaggtaatgtagtggctcttttctctatttgtgcaccttgggtaccaataccacttatttggccattttgatcaacgacaataccttcaatttgaataggggttgttggcattaactgcaaactgttataaacagcaggtgtaacctgtatttgtttgccttcaacgtaagggccacgatcgttaattcgcacaatcattgtgcgtccattgattaagtttgttattttcgcataacttggaataggcaatgttgggtgtgccgcagcaaactcataagggttgactcgttcacctatggttgttaagcgactcattgctaagctgtcgtaaacaatcgcttgtcctcgttcactaaagttcgccggatctttgactatgcgataaattaccccatttttacgataatcttgattcgcagtcgggtgataaggctcataacgaggctctatacctaatacgggttgtgtaggtacatttggcaaccttgtggttggctgattattattcacaggtttatcagcaacacatcctgcaagtagcaatgcactgacacccatcaaaacccattgcaaacgcatagaaacctcattataaactttttgataatagttttcggtgtgtatgaattgacataacaatgccaaatcctgccattagtacaattaatgccgatcccccatagcttaccagtggtaatggcacgccgactactgggaggatcccactcaccataccaatattgacgaaaacataaacaaagaagatcagcattaatccaccaatcatgactctgccaaatgtattttgtgcttttgtcgcgagataaagacctcgagcaattaagagtatatagagcgttagtaggattaaaacaccaatcagtcctaattcttctgcgagtacggcaaaaataaagtcggtatggcgctctggtaaaaactcaagttgagactgagtcccttgtaaccaacctttgccatgtaatccaccagaaccgatagcaattttagattggataatatgatatccggctcctaaggggtcaatttcaggatcaagtaacatcatgacccgtgttcgttggtaatcatgcatcaagaaaaaccagagtatcggaataaatccagcaattaatagtgttgcgacagtaattaaacgccaactcataccggcaaggaagataacaaaaattcctgaagcagcaattaaaatagaggtacccaaatcaggttgtgcagccactaaaagggtggggacgaagatcaacactaaggctattgctgtgttacgtaatgttggcggacaaacatcacggttcataaagcgagcgaccattagaggaacggcaattttggcaatttcagaaggctgaaaacgtatgatacctaaatcaagccagcgttgtgcacctttactaatttgcccaaagacatcaacaaaaataagtaatacaacacaaaatacgtaaaggtgaggagcccagttttcatacacccgtggagggatctgcgccatgataatcataacgataaaacccgtagcaatttgtcccagcttgcgttccatcatatcgggatcttgcccacttgctgtccacataataaatgcgctatagcataataaggcaataatgcagagcataaagaatggatcgatatgtaaacgcgtccagagtgattttttcttgttattttctgtcattgggttattcctctgagccacgcggtgaaggcggggaaataggcaactcggtgttgttgtctccaagtataatgtgatcaagtatttggcgagtaatatccccaacagatgggccagcaccaccattttctaaaattatagagacggcaacggtagggttttcataaggcgcaaaagcaatcattaatttatgatcacgaagatgttctgctaattggctagcattataggtttcataactaaatacctgtgctgtacctgattttgcagcaatcttataaggagcatcagcaaagctacgtcgccctgtaccattgggtagattggcaacaccatacataccgtacttcgctaactcccaataaccggagttgatatcgccaatttggcgtgtctctttatccacgtaaggtagcatttcattacctaacttggtgccataaagtaagtgaggggttttaacctgaccatcgttaattaaggtcattaacgcttttgacatttggattggggtcgccgtccagtaaccttgacctataccaacagggatggtatccccttgataccaaggttttttatatcgttgttgtttccattctcgggttggcataatgccattacgctcttcagaaaggtcaatccccgtgtattcaccatagccaaagcgggacatccatgtggaaatacgatcaatacccatatcataggcaacttgatagaagaaggtatctgctgactcaataatggatttagtaacattgagttttccatgaccccaacgtttccagtcacgatagcgtttttcagagccgggcagttgccaccagcccggatcatggatagttgtgttaggagtaataaccccttcacttagggctgcaacagacataaagggtttaaccgttgatgcaggaggatagagcccttgggttgcccggtttattaatggtctatcaggattattaagtaggccttgatagtctgtattagatattcccccaacaaataggttagggtcataacttggattagaaaccagtgctaatatctcgccgttacgaggatctgtgacgaccacagccgctcggctagtggttaatagcgtttcaatataggtttgtaattcaagatcgatagttaggtagatatctttaccggcttgtggtggttgctcatgcaattggcggatcacacggccacggctattaacttcgacctcttcataaccggttttaccatgcaaaacagattcataatagcgttcaatacctaatttaccgatatctcgggttgctgcgtaattaggatagagcccttctttttcaagacgttctacatctttatcgttaatttttgcaacataaccaataacatgagtaagggctgaaccataagggtaatagcgacgttgatagcctttgatttctaatccgggatagcgatattgattaatggcaaaacgtgccacttgcacttggtcaagtgacgttttaagcggaatagaactaaaacgacgagagcgttttcgctctttttcaaatgcagcaatatcgtcgtcagttaaatcaacgacctctcgtaaactctccaatgtttcttggatattagccactttctccggtacgatttctaattgatagatagtacgatttagggcaagtggaaccccattacgatcgtaaataatgcctcggctcggtgggatgggaactaatttgatccggttatcattcgagcgagtttgataatcatcgtggcgagcgacttgtaagtgatacaagttaaaaactaagatgcccgttaaaactaagatccctgaaaatgcgacaataacacggcggataaagagttttgactccgctgtataatctcgaaacggggtgcgttttcttttcttcatcccattagttgatttcacttacttacccgccaatttattattcccgatgataaggatggtttgtggtaatactccatgcacggtaaaggctttctgctaccactacacgtactagcggatgtggcatagttaatggagataaagaccaactttgttctgcagctgctttacaagcgggggctaaaccttcagggccaccaattaataagctgacatttcttccatctaacttccagcgatcgagttgctcggcaagttttggggtatcccaacgggcgccaggaatatcaagggtgacgatacgatttcctttacctaccgctgctaacatctgttcgccttctttttcgagaatacgcttaatatcagcatttttccctcgtttacccgcggggatctcgatgagttctaagggcatatctttgggaaagcggttaagataatccataaagccggtctggatccagtccggcatttttgtaccaacggcgatgagctgtaatttcaaactcagctccagagtttttcgagttcgtacatacggcgactgtcttcttgcattacgtgtaccatggcttcaccaaggtcaacaacaatccaatcagaaacgccttgtccttcgatgcctaaaggttgtaatcctgcttcacgacagtcatcaaccagattatcggcgacagacattaagtgtctgtttgaagttcccgtacagatgatcatgtaatcagtgacacttgattttccacgaacatctaatgcgataatgtcttgagctttagaatcctcaagtttatcaataataaattgctgtaattctgagccttgcaaaagggtcacctttttctatttagttaactcaatcgagaaaataacaaagcgctattttaaaggaatttataccaataaatctattttactcgatgatttattccagttgtcgatagcaaaaacatctatcaagtatggttgctattcgacgcttgatttagaaaaattcatatatgcctatttattgcgccataataaataataaaagccggcagataagaactttccaattagacgacagttttactccacagttcccttaatgggagccgagggtgagaataacagtaaaacaatgtctgtcaatgctcgtgaaatacctgataacggtatcatcacgtcaatgattgtatcattatacggtgtaatgttgagatagtgactaagagaaacagacgaatgaaagaaaattattattatttggagcaaacttcagaaatagcgagtaacaaaaacgcattgttacaggcagattggcaacgattttgtcaattgttatgctatgaaggcattgaaattaaacaaaataatgatgaaaaacgacaaaataaggcagtgatttgtcgagttaaaatgaaaggggaatattcatcaaccttattcacacagattttagggggaggagagttacaattaacccttgaacaattttctcaacctagtggattggaacattttctgacacagttttttgccttaattgattatcaacagcaggtaaatgctaagttgagcaaaaaagcactgatccaatttcatagtcgatataaatatttgttaatggcttattctcaagtcgcttatcgagaattggggcgttatatggccaatatccctaattcgctaccgctgttacaatttgccgagcagtatcaaaaggccttaatgaaagcactatcaataccagcaactcgagaagggcataccaatgcattaatgcatatggcgggatattttaagcgagcacttagcgcagagcaaaaacagttgttaacacaagagattttatcttatcggcaaggaaaaacgagtctttcggctcctttgtcacggttgaaaaactacttggcgttttatcctgataattatctactttctcaacgctatttttcaccttatccagctgtatttgatgacttaagagcgcaattttaatctctaagatctgttatcgatacaactgatgctgtttgatatagttttcaacagactcaggcagaagatcatgacaatctaatcctgctttatgtctagccctaatatcggtagctgaaatattgtataaaggagtatcagcaagaaaaattttcccggcgggtaaacagtgaatatctgcttgctgtttggtttgatgttgttcaagccaggtttgcatttgtggtgatgtaaatgtggtttggtaacccgggcgagcgcaaaccaataagtgacacacatctaacaactcttcccatttatgccaagtatcaattgaaagtaatgaatcttgtccaataataaaggctaatggctgtttctcaccaatttcttgtctaaacgcttttaatgtctcaatggtataagagggagtcggtttctctaactctcgagtgtcgactttgaaagcactaaaaggttgtaatgcgagccgcaccatggctaatcgctgttgtgaagaggcttctggttgggggcgatgagggggaatattattaggcaaccaaatcacttcttttagccctatcaagccagaaagggcttctacaggacgtaaatgcccataatggatcggatcaaaagtaccaccatatagagcaatggcttgatgaattaaaggggggttattattggtgctagccatggcgaataaatccttccggtaatgcttttccacataataataagccaagggcatgaagttcaggccaaacgttttgtccgtgatcctgtttaagggttatttcaatctgggtaagtaatcgcatggcagtgagtaattgatgctctgacaaacgttgtaacgcggcggtaaatatcggacgtcggttttgccatatccgatgttgatcgaaaacggattttaaggaggccgttttagcgctacgatgtaaggtaattaattgcattaattcgcgttgcaatgttctaagcagaataacgggttcagtatcctctctttttagttgctgcaagatatgccatgcccgttgggttttgcctgctaataatgcatcaatccaatgataagcagtaaaatgagaggcatcattgacagccgcttcaactcttggcagggttaatttaccatcaggatagagcaaacagaggcgttcaattgcttgagctaaagcgagtaaatttccttcatagcagtaacacagtaattgattaccttgttcatcaagctcaaggcctttttgcttggcgcgtctcgctacccaatttggtaatttatctaactcaggggttaagcaagtcacataaataccttgctggctgagtgttttaaaccattcgctattttcctgtgccttggttaatttatgtccacgtaaaattaacaagagatcttcatgcaattcgtgagataagcgtaaaagcttttctgacattgccgcattaggaccattttcaggaagatggagtaagatagattgcttttgtgaaaaaagactcagtgactgacagagtgaatatatttcattccaatcagtgctgttatcaagggtaaattgataatgttccgtaaagccttgtgattttgccaccgtttgaatggcatcttgagattcttggagtaatagcggttcattaccccaaagtaggtaactttggcgcaacccctcttggagttgcgcattaagttgttctggataaaggcggatcatttggctggtgagattatctgtttcgctttagctgcctctgacgctttttggcgttcagcattgtgaaccaccaataatttacgtactaagatagcggtagcctgttcacgcatttcctgtttgataatatcattttcggcatctttagctaatgcttctaatgggttatcaaagaatggacgtgaaacctgtgatgaaatagggtagatggttccatcaggcataatcacttgtgcatctaggacaaaagtgagctgacgttcagccgatttaccgtcttgatacacagagacagtctctttattttctgaagatccaacaattttgagaacaggaatatctgcttttggcgtttcaaccagttgaactccacttaatctcaattgttgacgcattacacgagacagtggcccgtatgggtcaccagagcttaggtaaagcgtttttaattcagctggaacttgggttttaccttgtaggtgaaaaccgcagccagcggtgaccaacaccgctaacgcaaaaaacagcgaaaatagatatcgcactaagcctccttatcagccaacaacgatgttcagtaatttgcccggtacataaatcactttacgtacggtgacattttctaaatatttagcaacactgtactcttttgttgccatttcctgaacataatctttttctgaattagcaggaacagtgatacgaccacgtactttaccattaacttgaacaataataagtttcgtgtcatcgaccatcgcttcttcatcagcaacaggccatggtgcaacatcaatatcctctttacctcctaacgcttgccacatgacaaaacaagcatgtggaatgataggagaaagcatacgtaccaccgcttctaatgcttcttgcattaaagcacgatcttgctcagtctcttgtggtgcacgtgttaatttattcattaactccataatcgcagcaatagccgtattgaatgctaagcggcgacctacatcatcagaaactttggcgatagttttgtgtaaatcgcgacgtaagtctttctgctctgtggttaatgttgccaaatcaagtgattgagtcgttcctttttcggtatgctcatgaactaaacgccataaacgacgtaagaaacggttcgcaccttcaacacttgattcttgccactcaagtgttaattctggtggtgcagcaaacatcataaatagacgtacggtatcagcaccataacgctcaaccatggtttgtgggtcgatgccgttattttttgatttagacattttgctcataccagcgtaagtcagttcatggcctgcactgtcagttgctttgatgatgcgatttttttcatcgcgttcaacaatcgcttctgcaggagagacccaatggcgagcgccatcttcaccggtataataaaatgcatctgctaataccatgccttggcacagtaagcgtttagcaggttcatcagaattaactaaaccagcatcacgcatcaatttatggaagaaacggaaatacatcaggtgcatgatagcgtgttcaataccaccaatgtaccagtcaaccggtaaccaatagttagcagcttttggatctaacattcccttgtcgtaatcagggcaggtataacgtgcgtaataccaagaagattccataaaggtatcaaaagtatctgtttcacgtagcgcaggttgaccattaatcgttgttttagcccactcaggatccgctttaattggactggtaatgccgtccattttcacatcttctggtaaaataaccggtaattggtcatcaggaactggaacaacgctaccatcttctaaggttgccattggaattggcgcaccccaataacgttgacgagaaacaccccagtcacgtaaacggtaattcactttacgttcacccacacccattgcagtaagtttatctgcaatagcattaaaaccagcttggttatcaagtcctgagaattcaccagagttaatcaggctatttttctcagtcagagcgcctgttgataagtcaggttggttaccttctgcatcagcaataaccgctttaatcggcaaaccatatttagtggcaaattcccagtcgcgttcatcgtgacctggaacggccataaccgcacctgtaccgtattccattaagacaaagttagctacccaaatagcgactttctcttgggttaatggatgaatagcatacagacctgtagcaataccttttttctccatggttgccatttcagcttctgccatcttcatgttacggcattcatcaatgaagtgctgaatttcaggattattttgagcggctttttgagctaatggatgaccggcggccacagcaacataagtgacccccataaaggtatctggacgtgtggtatatacggtcatggtatcgtcgctatctgcgacatcaaaggtaatttctacaccttcagaccggccaatccagttacgttgcatggttttaacttgttctggccattcatctaacgtatctaagtcgtttaacagctcttcagcataatcggtgattttaataaaccactgtggaatttctttgcgctcgacaggggtgtcgcaacgccagcaacaaccatcgatgacttgttcgttagccagtacggttaagtcgtgtgggcaccagtttacagcagaggtttttttatacactaaacctttttcatacagcttagtgaaaaaccactgttcccaacgataatattctggtgtacaggtggtgacttcacgatcccaatcataaccaaagcccagtttttttaactggcctttcatataattgatattttcataagtccacggtgcaggtgcggtgttattttttacggcagcaccttctgcgggtaaaccaaacgcatcccaaccaataggttgtaagacgtttttacccaacatacgttgataacgggaaatcacgtcaccaatggtgtagttacggacgtgtcccatgtgtagtcgaccagaaggataaggtagcattgacaggcagtaatatttttctttgttattatcttctgtcactttaaatgtattgttcttttcccagtgttcctggatagtttgctctatatcttcgggacgatattgttcttgcatggcaccgataatcctatggtgaattaatggctaccgaagggtaaccgctatgatgaattaagacttgcatagcatagctgattttgtctaatagccacaactattgatctcaaggaaagccattgtttgcataacttttttgccacaatggcgagatagcgcgaaaacagcatttttttgttaatgataaatgcgagattttcaagcggttagcctaattattgcaataaaaatgaattaattgctactgtgttgcgtcatcaaaggttgatgattatttttagcgatattttgctggcatgtaataattcatgccagcaaaggggaaaagtgagtgggatgaaaaagaaaattgaagattaatgtaagattttagctaggaaatctttagccctttctgatttaggattatcaaagaagtcatttttcgggctatcttcgacaatacgaccttcatccataaaaataatacggtcagcaacttttttagcaaagcccatttcgtgtgtaaccaccatcatggtcatgccttcattagccagctcaaccataacatcaagaacttcattaatcatttcaggatcaagtgcggatgtgggttcatcaaatagcatcgcaataggatccatacataaagcacgagcaatagcaacgcgttgttgttgaccaccagaaagttgagcagggtatttattagcgtggttggctaagcctacgcgctctaataattttagccctttctcttttgctgcacctttctctctattaaggactttcacttgcgctagtgtaagattttcaataatggaaaggtgaggaaataattcaaagtgttgaaacaccataccaactttggctcgtaacttagctaaatcagttcgtttatcattgacttttatatcatttactaggatttcaccttgttgtataggctctaaaccattaacggttttgataagcgtcgatttacctgagcctgaaggtccacagacaacaacaacttccccctttttcacttcagtggaacaatctgtcagcacttgaaactgaccataccatttggatacatcttttagggaaatcatctaagtagtcctttttttaagaaagttcactaacattgaagcggagaaactaattataaagtagacaaaaccagcaaaaaggatcatttcaacctgtgtgccatcacgctcaccaatatttgccgctgttcggaaaaagtcggtcagacttaatacatacacgagtgaggtatcttgaaataaaacgataccttgtgtgagcaataaagggatcatggcacgaaatgcttgaggtaaaatcactaaacgcatcgtttgtgattttgtcattcctaaagctaaggatgctgaaaactggcctttactgatgctttgtatacctgctctgatgatttcagagtaataagcagcttcaaatagagagaacgctaccattgctgaaattaaacggatatcactttttggtgaaaggcctagaacattttgtaatatgttaggcacaattaaatagaaccacagtaataccatcactaaaggaatagaacgaaaggtattaacgtaagcggccgcaaaccaactgatgggcttaaaagtagataagcgcatcactgcaagtattgttccccataaaataccgataacaattgctgttatggtgatttttaaagtaatgaccatgccatccattaaaaaaggtaggctaggaacaacagaactccagtcaaactcgtacattattgacctcctgctgtgccaggtaaacgcacccgtttttctaaccagtgcataatcaacataataatgacgttaataaagacataggctagtgtgatagcggtaaaggattcataagctttagctgaataatctaataatttattcgcttgcgcagccatatcaatcaggccaatcgttgaggcgattgcagagtttttgactaagttcagcatttcagaggtcattggcggaataatgacgcgataagcattaggtaataaaacatagcggtaggtttgtggcagtgttaagcctagtgctaagcctgctgctttttgtcctcttggtaatgaattgattgccgcccgcacctgttcacacatgcgcgctgcggtaaacaaacctaaacagagtgctgaagagacaaagaattggatattcggcgttaagtccattttgaaccaatcaccaatagcttgtggtaagagttcagggatcactaaataccatgtgaagaattgtacaatcagggggacgttacgaaatagttcaacatagatagcccctaaactagagagcaagcgattaggtacggttcgtaaaataccaaaaaaagagccgacaataaaagcgatgatccaagcacaaagagataaagcgacagtaacttgaaagcctgaaataagccaacctaagtaagtggtatttccaaaaggggcttcttggaagaatatcccccaatcccaatcaatcgacatgatttcacctccggtgaaaaaaatggggcagggaacggctgccccaaacttcactgatctgtctgtccaacagatactttataattattaattttgcatcaattacttatatgcattgttagttcaatgctttatcatttggtgatgcaaagagtgctttcatttcatccgagatagtgaattctaaattgaggtttttcggtggaattggggcattaaaccaacgattgaacgatttttctgctgcgccagatttttgcgcattagcaatggtttcatcaattaacgacttaaattgtgtatcacctttgcgtaacatacagccataagcttcttccgattgaggtgttcccacaatctcccataacgcaggttttttcgctttagcacgttcacccgctaataaggcgtcatccatcataaaagcaacggcacgccctgattcaagtgtacggaatgagtcgccatgatcttttgcgctaataatgcgcatattcatttttttctcatcattgagcttgttgagtaacatttcagatgtggtgcctgacgtaacaaccacatttttgcccgcaagatcagcaaaatctttaattccactgtcttttttcgcaagtaaacgtgtaccaacaataaaaatagtattcgagaaatcagcttgttgttggcgagcgagattattggtcgttgagccacactcaaagtcaaatgtaccattttgtaatagtggaattcgattctgagaagtgatagggataagacgaacttgtaggttaggtttgcctaatttttcttttactgcctcaacaatcaggttggaatagtcttgagagtatccgaccactttttgttgattatcgtagtatgaaaaagggacagaggattcacgatgaccaacaataataatatcgttatcgttgattttttttaaggtaccagtgagttcttctgcttgcacagctcctgcagcccctaaaatcattaatgataatgctagtttacgcatgcgcataataactcctgtcgtggtgatattgatgtgttgctttgtgttacttttttgttttaatttgttttgataatgttaataaatagaacaaataacatacggttgggaagtgcaatattccaaatacgagagctatctctcaataaaaggatgaaataaaaaattgttcaatgttttttggaagtgattttcaatatttaaaattattatagtaataaccatgagaagttaaaggttaaaaagaacaaagaagaaaaaggcgttaatctaaaaaagaaaagaatttgtaaagtttatcttaaggagttgtttgtctgtagattaccgttaagatagcaggtcaacaaatgaggaaatctatgcataattggcggtcaggtcgctggctagtgttgataacagtattgctgatcttgtgttgtattgttcagcgctctatgggggctcatgtgattagtgagcgcttagcatctgctgtttcgcaaacacagtcctcattctcgacgccaattgcagagcaacaaaatgcaagtgaagggaaatattcactttcaacctgcgaattaagtgctaaatcactcttatcgattcctcctttagcgattgaaccgcttttttatacttgggcggtattacttttatttggtatggctgccatttatgtttctcgtcaacgtagccagaaaaaacaacatcacccacctccacgaataaggcttcaccttcattactgtattctaagggattagtagcgctttaactcaataatacgtcttatattgaggcgttgttttatgtgtagcgttagaggattttttagggagttgctatggttcgttcttttttaatagcattgatgttgatgctattttcattatcttcattagccgccgatacaggttggctaactatgccagacaatgatcatgctcaggttagggctacggctgacaagtcatcgacaggcgatgttaaaatattgcttgaggtgcaattagcgccgggctggaaaacatattggcgctctcccggagaaggtggcgtagcacctgaaattaattggacgcaatctgtgtctgatatgatatggcattggccatcaccttccgcttttgatgtcgcaggtattcatacccaaggttacgataaagaagtcgtcttccccattgaactaaaatctgtcgatagcgataacttaaatggggtattaacactttcaacctgtagtaatgtctgtattttaactgattactcattaaatctggatttaaacgagcctgctcccgctgactttgaatggcaatataatcaagccatggccaaagtacctgtgacaagtggattaatttctgctgtttcatctgattatcgaaatagtcaattaaccctctcattacaacgagaacaaggtgactggcatcaacctaatatttatctcgatccaccacaaggaatgctatatggcattccacagttaacagcaaaaggtgatcatttatctgttactgtcgatgtaaccgatgattggggagacgctgcgggtgacattacaggaaaagcactctcctttgttgtgactgacgatggctattcacgtcaagtcaatgacactataggccaaggcgatagcgcatctctgcctactgctgactcgggggtaggattatggagtattttagcctttgcgctgttagggggcttaattcttaatttaatgccttgtgtgttgcctgttttggcaatgaaattgggctcaattcttcatatcgaaaaacgtgatacaggggctattcgtaaacagttttctgtttctgttgtgggaattttagtgtcattttgggccttagcgctgtttatgaccgtattacgctacagtcaagaagcaataggttggggcatacagtttcaaagcccttggtttatcggctttatggtgctgatcacggctatttttaccgctaatttatttggcctatttgaattacgtttatcaagtaatatgaataccaaaatagcgacagcaggaggccaaggttatagtcgacatttctgggaaggggcttttgctacattgcttgctacaccgtgttcagcccctttcttggggactgcggttgcttatgcattgatagcaccattaagtgagttatggttaattttcaccgcattaggtcttggaatgagtttaccatggatcatggttgctatgtttccatcaattgccaaagtgttgccaaaacccggtaaatggatgaatcgcctaagagttgttttaggctttatgatgttgctatcttgtatttggctgatcactttattgatcccccattttggtattggcattgttgcggctatttttgtggctatcgccctgatcttgctttttgctattgctaaacattacggcaaaaaaacgctatttgcttcaatggtgatcacccttattttgggtggtacaagctatctatttattgctcagcctgatactcagaccttggcggggcaagatcatgtaaattggcaaccactctcagaagaggctattcatcaagcgttagctgaaaataaacgggtgtttattgatgttaccgcagattggtgtgttacctgcaaagcaaataaatacaatgtattattacgcgatgatgtgcaaaaggcactttcagagcctgatgttgtcgcattaagaggggattggacgaaaccgtcagaacagatcacccaatttttaaaacagcgcggtcaagtcgccgtgccgtttaaccagatttatggaccatgtaacaaggagggggagatcctaccgcctcttttaaataaagatctaatgttaactattctttcagaggctaaaggagcccaataatgaaaaaaacactttctgtactggttatctcttcgttactttttggtgcaaatgttcaagccgctgccttgaatgcagctcaagaaaaagaagtacgtgcattagttcgtgatactttagtgagtaatcctgagattttggaagaagctatcatggcattgcaaactaagaaggcagatgagcaacaagcacagttccgtcaagcattggcctctgaacatgatgcattatacaacgatgcggcaagtccacgtattggcgctaaagatgctaagttagtgttagtgtcgttcactgattataactgcccgtattgcaaacgctttgacccattattagaaaagatcaccgaacaataccctgatgtggcggttatcattaaaccattaccatttaaaggtgaaagctctgctaaagcctctcaggcggtgctttctgtctggaaagaagatccaaaagcattcttagcacttcatcaacgtttgatgcagaagaaaacgatgctagataatgcaagtattgaagatgcaatgaagagcactaatactagcaaaattaagttaactgatgacagcttaaaaacgttgcaaaataacttagagctttctcgtaaactgggtattcaaggtacgccagcgacggtaattggtgatactattttaccgggtgctgttgattatgatcagttagaaattattgtgaaagaacaactggcgaaagtgaaaaaataatggcaaatcgtttacgaaaatggggtaaagaattaattattctcgcccttatttttgtggctatttcatttgctatggactggtggcgtcaaccaacgccaccagaacttactgatttatctacgctttatacagttgatgataaaccagtctcattgattgcccttagccaagagaaaccattactgatctatttttgggcgagttggtgtggcatttgtaagttaactacaccgacggtaaatgatttagcacaacagggttataatgttacgtctgtagttatccgctctggtgatgatgccaaaataatacgtggcattaactccaagcaactagtttttccggttattaatgatgatagaggggctatttctcaacgttgggggataagtgctacaccttcttttgttattctctataaaggtgaaatggtgcactttacaagtggctggacatcctcttggggattaaaacttaggttatggtgggcttcaatttaacttgtttatcagagtttaaatgaagaaaaaataatgccaggtaggctgataataaaatctattatctcatagacaagttttttacgtctgcgttttatttttgcttcttggctaccttgaacaattaattccttttcattgtaagtgcgttttgaggtattaatatgtattggtacaatattaataggaataacgatttgattattcttattggccggtgttaattgagctaatgtccaaccatattgatgttgtttatctccaaacgcatttttctggataatacgaccgtaataatctttacgaaaacctttttcttcattatcgctggaaatctgatgggcatgttgccaataaggtaaaacatctgttggtgattgaatgagtcgcgatagtgctggtgggtcaagtgggatcatattgagacgtttagagcttgcttcttgtttttgctcataggctctcgctgtttgccaatgtaaaggcacaattgtttcatcttcaataagttgatgaatcgaactaggttgttttgataatacccagccaaattcattttgttgattaaacagttggcgcttgatccatttagtttctttatctttacgaaatccttttgtttcattatcggcagatatttttttcgctctttgccaaataatatcaagaatatattcagggtaatggatcattgaaaagtccttttattagaaaagcccttacttaattaattgttttaagattaattgagcagggctttatttaacattaagaacgacgcttaataaaagcaagaattaaaaatacccctgctaaaatccacactggataactccccattttataataaggtgttgatcctgtcgtgggtgtcattttttcagctaatgcaccggcttcaaattgtggaagctgggcaataacatcaccattagcagcaataaaggcggtaatgccgttattagttgaacgtaataatgggcgtcctaactctaatgaacgcattctagccatttgaaaatgttgccatggaccaattgaattaccaaaccaagcatcatttgaaatagttaataagaaacgtgtatccggcttaaagttagcgcgaacttgttctccaagaataatttcataacagatggcggcggttattttagcatcatttaccgtcagttgaggttgtatgtattcaccttggcttaatgatgacataggtaaattaaaaaatggcgctaatgggcgcaataaggactctaaagggacatactcaccaaaaggcacaagatgatgtttgttatagcgatctgttgccggatattggtaagcatagtgttcacctaatgtaataacactattataaaaacgatagccttctaaggtgggacgcgcatcaataattcctgtcattagatgcgtgtcttgtgctcttaattgtttatccaattgcgctaaaaagccttgttgctgaatttcaacatcagggatagctgactcaggccaaataattaagtttgctttaccgataaaagggcgacttaaggtgagataggtgtttaacgtactttctaaagtaccgggttgccattttaatgattgcgcgatattgccttgaactaaggcaatttcttgtgtttcatcagttaaaggttgataccattgataagatttaaagctgataggtaagagtaataatattgctccgatcaccgcactatatagtgatttacgatagatagcgacagcaataagtccactaattatggtcagcaaaaaggttatcatggtgacaccaaaaataggtgcaataccttttaatgggccatcaatttggctataaccaaattgtaaccacggaaaccctgataacacccaacctcttaaaaattcagtgagttgccatacagcgggagccgcaaagacaaaacgccaaacggtaggtttagggaagaacttgtttaataatccggcaaatagggcggtataaagcgataagtaaagggctaacaatatgactaagaaaatattgatagcaaatggcattcccccaaaatcagcaatgctgacatatacccagtttacaccactaccaaataatccaaatccccaggcaaaaccaagccatgccccttgtcgtgtggttcgttgcgttattatcagtagcaaacctgataaagaaattaacgctgcaggccagaaatcaaagggagaaaatgcgagtgtgccactggcaccgaaaaaaaccgccagtagggtgcgaacccactggcggtttaataaagagaaattattcattaatatcctacacatcattacctagttcaggtacaggcgcatcgtcaggaatgtgcacataaacctgaataattttacggctatctgccataacaactttaaattggtaattatcaatggtaatagtttcacctctagcaggaagatgaccgaaggcttgcataactaaaccaccaatcgtatcgacttcttcatcactaaagtgagtaccaaatgcctcattaaaatcttctatttgggttaatgctctcactgagtaggtatggcgacttaatggacgaatatcaatatcatcctcatcatcatactcatcttcaatttcgccgacgataagttcaagaatatcttcaatcgtgaccaaaccagaaacaccaccaaattcatcaatgacaatagccatatgatagcgttgcgaacggaactcttttagtaagcggtcaacgcgtttactttctggtacaacgacagcagaacgtaaaactttgtctatactaaatggctcagcaccagtacgcataaatggcaataaatcttttgccattaataagccttcaatatgatctttgtcttcactgatgacaggaaagcgagagtgcgctgaatcaataatcacatcaaggcactcatcaagggtttgattgcgttttaatgtgacgatttgcgagcgggggatcataatatcccgtacacgctgttcagcgatatccattaccccctctaacatatcacgggtatcaggatcgattaattctttctgttcagaatcgcggataagctccatcagatcatcacgatttttaggttcaccgtggaataactgattaagcaatgtgagaaacccctttttaggaccagggttatcgttactcgaagattggtcgtcgctcatggcgttttaactatttttcctcattgaatggttattagatatagtatttatcataaaataaagagaactgttactctttttcaatcaaatagggatcttcataacctaatttttgtaagatttctgtctctaaaccttccatttcttcagcttcatcatcttcaatatgatcatagcctaaaaggtgcagacaaccatggataaccatgtgtgcccagtgctcttcaacagttttattttgctcatcggcttctttttcaacgacctgacgacagataattaaatcacccagtaaaggtaattccacttcaggcggtgcttcaaaaggaaaagaaagtacattagttggcctatcttttccacgataagttaggtttaactcatggctttccgcttcatcaacgatacggatagtcacttcactaataggctgaaattgcggtagtacggcttccagccaagtgataaattgggcttcactcggaagcccttgtgtattttcagtggcaacttgtaaatcaagaatcacttcactcatgattttctctctgcagtctctctttttctgctttaattgcttggcggcgtttttgatcttcaacttcccaagcttcatatgcgacaacaatcttagcaaccacaggatggcgaaccacgtcttcactatggaagaagttaaagcttaaatcatcgacattagatagcacttctatggcatgacgcaatccggatttatggcctcgaggaaggtcgatttgcgtgatatcacctgtgatgaccgctttagagttaaaaccgatacgcgttaaaaacatcttcatctgttcgattgtggtgttttgactttcatcgagaataataaatgcgtcattgagtgtacgacctcgcatataagctaaaggggccacttcaatcacattacgctctatcagtttctcaactttttcaaaacctaacatctcgaataacgcatcataaagtggtcgtaaatacggatcgactttttggcttaaatcgccgggtaaaaaaccgagcttttcacccgcctctaccgcagggcgagtcagtaaaatacggcgtacttcttgacgctcaagggcatcgacagcggcagcaacagccagataggttttccctgtacctgcaggcccgataccaaaagtaatatcgtgagtttggatattggcaatatattgcgcttggttaggcgtacgtggttttatcacgccgcgtttagtgcgaatattggtcgatttcccaaattcaggcacatgctcatcactttgctcaagcactcggctctctttgatggcaaggtgaatttgctcagggtcgatgtcgggtatcacacctttaatgggtgaggtttccacatacagatgtcgcaaaattcctgcagctgcattcacattcagtgatttacccgttagtttaaaacggttatcacggtgattgatctcgatacctaaacggcgttcaagttgcttaatattgtcgtcaaatgggccacataaactcattaaacggtcattatctgcgggctctaagaaaatctcttgggtcgctacctgtgtatgggctattactgtcactgagtatccttttgttaagtctgatcaattaaggttggtaaacacctacacctaattcatcttctttacgagtacgggcaataacggattctggtgattcatggatacgtaaatccatttgatcttccgttctgaccactttaccacgcaatgagttagcgtaaacgtcaacaatttcgacatcaacgaatttaccaatcatatccggtgtaccttcgaagttaaccacgcggttattttcggtacgacctgaaagttccatcacatttttacgtgaagggccttctacaagaatacgttgtacgctgttaagcatggcacggctgtagttcattgcttgctgattaatgcgctgttgtaacagatataaacgctgtttcttctcttcttcactcacatcatcaggtaaatcagccgcaggggttcctggacgggctgaatagataaagctaaagctcatatcaaagtttacatccgcaattaatttcatggttttttcgaaatcatcttgcgtttcacctgggaaaccaatgataaagtctgagcttatcagaatatcagggcgtgctttgcgtaatttacgaataatgctcttatattcaagagctgtatgattacgcttcattaaggttaaaatacgatctgatccgctttgtactggtaagtgtaagaagctaaccaattcaggggtatcttcataaaccgcaataatatcgtcagtaaactcaatagggtggctggtagtaaaacgaatacgatcaataccatcaatcgctgccactaggcgcagtaattctgcaaagctacagatttgcccgtcaaaggtttcaccacgataagcattgacgttttgacctaatagattaacttcgcgtaccccttgagcggccagttgtgcgatttcaaatagaatatcatcacaagggcggctgacttcttcaccacgcgtataaggcactacacaaaatgagcagtatttattacagccttccatgatagaaacaaatgcagaagggccttcagcacgaggttcaggtagacggtcaaatttttcaatttcagggaaactgatatcgaccactgggcttttggtgccttttacctgattaatcatttctggtaagcggtgtaaggtttgtggtccgaagataatatcgacacactgcgcacgttgacgaatgtattcaccttcttgagaggcaacacaaccaccaacgccgatgataatatcaggtttattatctttaaaatttttccaacgtcctaactgatgaaagactttttcttgtgctttctcacggatagaacaggtatttagcagtagaatgtccgcatcttcggcgacatcggttaactgataaccgtgggtgctttcgagtaggtctgccattttagatgaatcgtactcattcatctggcagccccaagttttaatgtacagtttttttatcgtcgacattgtataaatccggtatttacagtgagataatagctaatcactgaaaaacgttgcgtgtaataagccaataaggcggttattgtagtcatttgtgtggtcagtgactagagtcagtcggcgctaattctttctggcgttcagttttgcttatttctaataaactgatatagcgcttacctattatttttaaagcaatgagttatggcataacaatgatgagaaatgtaaaaaacgattttgatgcagtcattgccggtggtggcatgattggcgcagccgttgccattgggctggcgcaagaagggttgcgtgttgcaatggtagaacggcaatctccagcaccttttgatgcctcatctcatcctgatattcgtatttctgcgatcagctgcgcgtccgttagtttattaaaacagctaggtgcatggcaacatgttttagcgatgcgcagtgcgccatacctaaccctcgaaacatgggaagaagataatgcccatgttatttttgatgccaaaagtcttggtttacctgaattaggttatatggttgaaaatcgcattttgcaattggcattgtggcaagaagcagaacgttatagcaatatcactttattatgcccaaatagtctaagtaacatgaaatacttagataataaatggcaagtcacgcttgctgatggtcagaaaatcaccactcagttagttgtaggggccgatggggctaattcgcaagtgcgtcaaatggcggggattggcagtaatggttggcagtatcgtcaatcctgtatgttaatcaccgtgaaaacgcaattaccaccagaaaagggtacatggcaacgcttttacccttcagggccacgggcttatttgcctctgtttgataattgggcttgcttagtttggtatgattctccgcagagaattagaaagctacaaacgatgtcaatggcacagttagaaaaagaaatcgaacatgctttccctgaacgcttaggcaaagtgacacctattgcagcaggctctttcctattaactcgtcagcatgctagtcgttatgttgataatggtgtgattttagtgggggatgcggcacatactattaatccattagcaggacagggggttaacctcggttatcgtgatgtggattgcttgcttaatttagtggcgcaagcgaaacagcattttgaaccttggcattcaatggcattgttaaaaaaatatcagcgccgtcgtatgcctgataatatgctgatgcaggcaggaatggatctcttttaccacgcttttagccatcaattaccaggcttaaaattagccagaaatatcggattattagctgcgcagcatgcaggaaaagcgaaagaagccgcgctacgttatgctttagggattaaatgatgagcaatgcgatgatctgaattgtcttcatcgatcatcgcattaggtttaagcctttaagtgcttagcatgaaaggctatatgttcaccgataaaactcgcgacaaaatagtaactgtggtcgtagccttgatgtaaatttaaacagcacgcaaactgttttttatcacacacttgtgctaaacgttctggctgtagttgctgttggtaaaaaggatcatcaagaccgacatccactcgtatgggcactgtctgttgtgttttattcagtaattcaatcgtgtcatattgttgccattgtgccatatcgtcgcctaaataagcgctaaaggctttttgtccccaagggacttgggttggtgcaacaatgggtgaaaacgctgaaatactgcaatagcgagacaaattacgcaaaccaatcatcaatgcgccatgtccccccattgaatgtccactaatagcacgttgctcattggcaggaaaatgtgtctcaatcaatttagggagttcattaacaatgtagtcatacattttataatgactattccaaggtgcttgtgtggcattcagataaaaactagcaccttgtcctaaatcataagcactatcatcagccacattttcaccacgagggctagtatcaggtaccactaaaataacaccgtgttgcgcagcatattgctgtgctccagctttagtaatgaagttttgttcattacaggttaatcctgataaccaatataaaaccggatatttttgcccatcttccataggcgggagatagatagcaaatttcatctcacaattgagggtggtagaggtgtgttgataaacctcttgccaaccgccaaaacaggcatggcgttcaatgttgttcattttgactccttaacaacaaagtcagacctatttgataataggcctgagagtgattaatcgaaatgaataacagttctaattgatttaccttcatgcattaaatcaaaggcttcatttattttttcaagaggtaaagtgtgggtcacaaaaggtttgagttcgattttcccattcattgcatcttcaaccatattgggtagttggctacgaccttttactccgccaaatgcagtccctttccatgaacgacctgtgacgagttggaaagggcgtgttgagatctcttgtcctgcccccgcaacaccaataatgatagattgcccccaaccacggtgagcactctctagagcggctctcatcacattgacgttaccaatacactcaaaagtatgatcaacgccccactgagtcatttcaaccagtacttcttgaataggtttgtcataatcattgggatttaaacagtctgtggcaccaaattggcgtgctaatgcaaatttttcaggattagtatcaatcgcaaaaatacggcctgctttggcttgtctagcgccttgcagtacagcaagaccaatgccacctaaaccaaatacagccaccgagtcaccttgttgtacttttgccgtattatgtacagcaccaatacctgttgtcacgccacaaccaagtaagcagacttcttcatggttggcttgtggattgattttagcgagtgatacttcagctactaccgtatactcactaaaggtagagcaacccatatagtgataaataggttgtccattataggaaaagcgcgttgtgccatcaggcattaagcctttaccttgggttgctcttactgctacacagagattcgttttgcctgatttacaaaataggcattcgccacattctgctgtatagagagggatcacgtgatcacccggtttgacactggtgacgccttcacctacttcaaccaccacccccgcgccttcatgacctaaaatggctgggaaaacaccctcaggatcatcacctgaaagggtaaaggcatcagtatggcatacgccagtgtgactaattttaatcaatacctcacctgcttgaggtggcatcacatcaacttcaacaatttttaaaggctctcctggtccaaaggcgaccgcagcacgagatttcataatgatatccttgttgttattagcgcaggtaagtgcgtattagtgagattgcatcatcaacggagtttttttgatcttcaggagaagcgacggcatccattagaccttcacgtaaatgactttcgagtacgcccgccatcaggccattgatagcaccccgaatggcagcaatttgctgtaaaacttggccgcattcattttcgttttcaagggcggtttctaatgccaaaatttgccctttgatttttcttacacgggttaacgcggcttttttttctgctggtgagtgtggcatacataatccttaattatactatgggggagtatagtattagcgtgaatgtatgtacagcttgatcaaaaaatagcgttacgatgagtctatgtagattatcgagcaaacaatgataactatgagagtaattaatgagaaaatagacaaggcgtcagcgtgttgataaagggtgagagagaggggatatttaaggctaaaaacaaaaaagacccgccatagcgagtcttgtttgttgattttaattagtgtttgacactatcaatcaatggtgcgggaggcgagacttgaactcgcacaccttgcggcgccagaacctaaatctggtgcgtctaccaatttcgccactcccgcaacaacctttgagaaaaaaagactcgtttaacgagtctctctttcagaatatggctggggtacctggattcgaaccagggcatgccaggatcaaaacctggtgccttaccgcttggcgataccccaaaatggtggctatgacgggattcgaacctgtgaccccaacattatgagtgttgtgctctaaccagctgagctacatagccaataggagataatttctcactatttattgaatttagcagaaatatggctggggtaccaggattcgaacctgggaatgccaggatcaaaacctggtgccttaccgcttggcgataccccatccgctaattcaattgtcaacacgcatattatctatcaggaaaatggctggggtacctggattcgaaccagggtatgccaggatcaaaacctggtgccttaccgcttggcgataccccacctgataaattgacgacggttaaaatggtgcgggaggcgagacttgaactcgcacaccttgcggcgccagaacctaaatctggtgcgtctaccaatttcgccactcccgcaaaaaagatggtggctatgacgggattcgaacctgtgaccccaacattatgagtgttgtgctctaaccagctgagctacatagccatcttttttttgcataaccttcgtcggcgttgcggggcgcattatgcgtattacagacaaatccgtcaactgctttttgcattaattttcgagaaaagtgttcgtttgctcgctggttaatcattttgtcgaaaaaagatccaaaaaacaaccttattgatgaaaaatcttactaagtaaataacaacagattgtctgaataaaaagaaaaaacagcctaataggtgataatttgatagcacagggaaggggatattgcggtgtggtggtgacataataaaacaacgcacagttattttagctgcacgttgttttttaaacaaagatgactggttgaaatttatcctaaaattaatcttaattgagataaataacagccttcatttaaaaatccgttttattgtaacaaaaagattatttgtcgaataaatattgtagtaactctccattaagcattgctcgcttggtaagtgcaaatgccccaatggctgagcgatgatcaagttcggagataacaacaggaagcgcttctctaaactcttttaatacttgggtattaatgcaactttggatcgacggtagtaatatttcagccgcttcggtcacttctcctgccagaaccactttttgtgggttaaataggttaattgcaatggcgatggctttacctagatgaagacccacttgtttaatggtttcaacagcgaggggatcgttttttaccgcggcatcgcatatatcttgaatttggcattgtgttgcagataaatgctggctgggatagccttgttcaagttggtagcggactttagcttctattgcgctattggacgcaatagtctctaaacaaccaaagttaccacagtggcaacgctctcctaatggatctatttggatatgaccaatttcaccaagattaccacgctggttgagcaaaattttgttgttgataataacaccagcccctgcgccacgatgaatacgaaccaagatagaatcttcacaatctctggtggcaccaaaatagttttctgctaaggcgagactccgaatatcatggcccgcatagcaaggcaggtcaaagtgtttttctaagctatcaacgagtgcccagttatttaccttcatatgaggcatatagtggacaatgcctttattaggatcaactaacccgggcaagataattgaaattgaaataagctcattaatacgacgttgattttgtttaataaaatcatcaatagcattaataagcaaggtttcaacttcttgttgggtgctttgttctaaagggtagtgttgctctactaaggctttaccactgagatcataaagagcaacagtggcatcattgcgtcctaatcggacgctgacggtattaaaacggcgatgttccacaacaatggatattgcgcgacgacctccggttgaagcctgttgatcaacttctttaatcaagccacgttcaagaagctgacgagtaattttagtgacactggcaggggcgagttggctctgctcggcgatttgaatacgagaaatcggcccgtgttgatcaatgagccgatatacaatcgcactgttaagttgcttaacaagatcgatattgccaatttgcgtttcagtgttgttgtgactcatcagcatttacatccattagttatctgttatttcaataccattgacaaatgttgtgcaaaggttgaagtccttatcaaaagaagcaatatttgctattttacctgcttcaattgtaccgagttcgttatctgcaccaatcgcacgggcagggtaaagtgttgccatacgcaacgtttcatctaatggaataccaacatgaagtacactatttttaatagcgtcaatcatcgtgagtgatgaaccacttaatgtaccgtccgcatccacacacagcccattgcgataatatatcgtttttccagcaaaaacgaagctatccatctcatttttatttggatcaagccccgcaggagctgtcgcatctgtcactaataacagtttttcaccttttaagcgcttactgttacggatatttgcccatgaaacatgtaaaccatcggcaatgatccctgcgtaaacctcaggggtatcataaattgcccctacaagacccgggccacgacctgaaatataaggcattgcattataaaggtgagtcgacaatgaaataccgttacgaaagcctttacgcgcttcttcataggtggcatttgagtggcctgcagaaacaacaatacctgctgtgattaattgacgaacatatttttcatcgaccatttctggtgcgagtgtaattttagcgatgacatcagcgttatcacacaaatagtcaatcatctgtgcacttggttgacgaataaattgaggatcatgtgtcccttttttaatgatattgatataagggccttctaaatgtaatcccaacactttattttggtgtttttgcatataagcgcgagttgcttcaatgcctattttcatcaattcatcagaacaggtaattaatgttggtaaatagctagtacagcctaagcgttcattggctttttgcataatctctagcgtttttactgtgacattttccgcggtgtcattaaattgtacaccgccacagccattgacttgtaaatcaataaaaccgggggagacaatcgcaccttgcatatcacgagtggctatatcttttggtagttgatcctgtgggcaaacctgctcaatacgtgacccgttaataataatggcgtgatcttctaaacggtcataacctgtataaataacagcatttgttaaggcaaacatacctttgtctcctaatataagggaagtcaatctaaaaaaccgatatcagccagcaaattctggctgataagtaagagagcttagttttccactacttatcgtaggtacttaatttactaaacttaatcttggtattgctggcgctcttgcgcttcaatttgttgaaaataacgcagtgttttcacacgcagttccattgtcgccggatcatcacagactaaaattgctttagggtgtaattgtacgcaagagatagtccatagatggttaacagcaccttctgttgccacctgtactgcttgagccttattgatgccagtcgctaaaatcattaactcttctgcatctaataatgtccctacaccgacagttagcgcatatttaggcactttattgatatcgttgtcgaagaatcgtgaattagcgagacgagtatcttcagtcagtgttttcatccgtgtacgagaagcgagtgatgaggcgggttcattaaaagcgatatgaccatcattaccaacacctcccataaacagattgattttgccataagactttattttcgcctcataacgtgcacattctgcttgtggatctgttgcattaccgtttaataaattgatattttcatctttaatatcaatatgattaaaaaagttctcatacataaaagtacgataactttgtgggtgatctgctggaatgccaacatattcgtccatattgaaggtgacaacatgctggaaacttactttacctgcacgatgtagttcaattagcgctttgtacgttgctaatggcgtaccaccagtaggtaaaccaagaacaaaaggacgatcggcgcttggcgcaaatgcgttgattttctcaacgatataattagccgaccattttcccacttgctgtgccgtggatagggggattaacctcataataacctcatagaaaaaagacaaatctgacaatcaagttacatactatttcaatgcgtgattatcagtgactcatctataacacgaattgcttttcatttttagtcaatgaagacatcaatccttcaaaagatatttttaatcataaaataagctttctgacttagccagcatttaagctaaaaaatatcctatataggtgactttaatcacaaattagcactaattaatttgcgatacaaaataatttttttagactaaaaatggaattaaataattaactcatcaataaatataaatgagtataaataagatcccaaataggggttatccaagggggagtgtgtgaatattttaagttatctgcaaaagataggacgggcattgatggtgcccgttgcgacattgcctgctgctgcaattctgatgggaataggctactggattgatccggtaggctggggaaacgataatgcgctagctgctttactgatcaaatcaggtgctgccattatcgataatatgtcagtattgtttgcgataggtgttgcttatggtatgtcaaaagacaaagacggggcggcggccttaactggctttgtcggctttttagtggtgactacactttgttcacctgctgcggtatcgatgatcaaaggtctaccacttgcagaagtgcctgtggcttttggtaaaataaacaaccagtttgtcggtattctggttggggtactttcagctgagctgtataaccgctttagcagtgtcgaattacctcgtgcattatcattttttagtggtcgtcgcttagtgccgatcctcacgtcattcttgatgattatcgtcgcctttattctaatgtatatctggccggtaatttacggcggcttagtgagctttggtgaaagcattaaagatatgggggctttgggcgccggtatttatgctttctttaaccgcctattaattcctgttggtttacaccatgcgctgaactctgtgttctggtttgatgtggcgggtattaatgatattcctaacttccttgctggtcagcaagcgattgatgcgggcttggcaacggtcggtgtgacaggacgttatcaagcaggtttcttcccagttatgatgtttggtttaccaggggcagcactggctatttatcattgtgcgcgcaaagagcataaagcaaaagttgccggtatcatgatggctggggcatttgcggcattctttacggggatcactgaaccgcttgaattctcctttatgtttgttgctccagtgctttatgttattcacgcattcttaatggcgatttctgtttatattgccgcaagtatggagtggatttcaggctttggctttagtgcgggccttgtggatatgttcttatcttcacgcaaccctctggcggttaaatggtatatgttgattgtgcaaggtatcgcattcttcttcatttactatggtattttccgtttcactattactaaatttaacctgaaaacaccgggtcgtgaagatgaagtggcgggggatgaaaccgcagacggctatgatgaagatatcaaagccgtccccactaatagcaaagaagcagtgcaacaagaagcacgtcaatatatcgctgcagttggtggctcagataacttaactggtattgatgcttgtattactcgtttacgtttaaatgtaaaagatgccagtgtagtcaacgatgcttacgcaaaacacctaggtgcttcaggggttattcgcttaaataaacagagtgttcaagtgattgtgggcacacgggctgaaattgttgcaagtgccatgcgtgatgtattagcacaaggcccagttgccgcttatgctggtagacatacagataacgcggtatcgacagaaaaaacatcagaaaaacagactaataatgatgccaaagtcattcttgaaatggtcgcgccatttgatggtgaagtggttgcattaaaagatgtgcctgatgaagctttctcaagcggtgtcgtgggagatggtcttgctattaaacccacatcaaatattgtgatggcacctgctgccggtacggtagtaaaaatctttgatactaaccacgcattttgcattgaaacggataacggtgttgagattatcgtccatatggggattgatacggtcgcattaggaggaaaaggctttaaacgtctggttgaagaaggtacagaggttaaactcggccagcctatcttagagctagatcttgagtatttaaacactaatgctaaatcaatgataagtccggttatcatcagtaatatcgatgactttgataaagtgagtgatattgcatccggccaagtgacggcaaataacaccataatctataaagtattaaaataaatatcatatagatatttaatcctctataaagagatggttaaataagacgataaaacggggagtgttgtctacttcccgtttttttatccctatcttgataaatatctctgcgctctctttcgctagggtatttatgaaacctgcttattggattatagtggtgttcgtttttttgtattataaatcaatgtcatacatatcgatactcacaatcactcactattaactcacaattcaacgtagccattacctctatcatcaaggtatttatctgtcattctcatagatttgtggccaagtattttctttgcaaactcagcacttttttcttcttcatataatcttgcagataaacttctaatttcatgaaatgttggtttattctctaaatactcaggtagggcttcgataaacttacctcttaatgtttttgctgtggtattgccacagattttatctgagctcctattcatgagatttaaaacatctttaatagaataaccaatagactcaagtcttaatgagagtggtattgctactttagaacctgtttttatttgggtgacatacagcctatcattttttatatcatcccacttcatattgataatatcgctaatgcgctgagctgtaaggaccgctagtagaaacatatgcctatatttgtcatttgtgtgctccaaggcgtatttaaactcttctagcgataaccttgagcgctgaacgcttgtttttggcggctttgtcacggaaacgggattttcctttatcacaccatccgcaatggcttcattaaaagcatctagcatagtggaccttagtaattttgccattgcctttttagggtactctgaaataaatgtggctacatctcttggtgttacattctcaattggacagtcattaaagtgtaatttgattaactttattcttgattcgtaatcgtagagcgtcttctcttttaacccccggctgtttaccttccccctataagtatcaagccactcatgcaatgttacacagtgaacattattaattctgtcaactaatgactctttaggtttataaatagccaaattggcttgtatggcttcggttattgctaatgatttgtttgagccaacagaaaattcctttttagttcttacatccctgtaatagtaaatccctttacgcaaatacaagttaggcggtaaacccttgttctttgcacttctgcttctgcccattaattttctccattaaatattgcggttcccttaccattttgtcatttgttagaattgtccacggctctaactcatattctctaccaaccttttctggagcagggtataacctaccttcctttatatagcgagataattgccgttgacttctagggttagcgaaatatttattattccattctgataatgtaattcgtttcattgattattctccgtatccttcatcattaaaaaaacttccatagcgccacggtatgggtttttatttactgacatgaagtcataatcaaggcagtcagctgtccatttattagaatggtacattggtgataaccctattttattttcaataataatcggcattgcgtctgatgggttattgcatgggtcgaaaaagcgataaccaaacgagccatcaacaaggaattggataatatccattgtttgtttaattacatcgtattgcgtttcaggtaaaacagattgagctactaataaattaatctcgaaatcagatagttcggtgtatttattcattatcatctcctagtatttcattaatagtatttctgatgtcaattaagtcttgttttgtcacatccatattccaagatggagtatttaaaataaaacaatcttttgttgtaggttcaatctcaatacaatctttgtaattttccaagccagcataatatttatctttcattccatacctctccacaaacaactttaacattcctcactgacattaaatattcagcacgtttattgcattccgattgcgtataaatatcttccgtaacaggcacagcagaaccctgtattaacatgtgtaatacatatccgattatttgcatgaattgttactctgaattttaggtataaaaaaccctgcactagcagggtgggtaattaataataaagttcatttagtctagatgttatttccctttctgtttcttttaggaaatctatcaattcatttttatctttacagctaaaatgttcatcagggatgtctagtgaatgcgcatgtgaatacataacatagctatatgttttattaatgaaattctcacttaatgagtcaatgtctaagataaatataaataaatataaactcgcatgtatattatttctatccaaaaaatcattatttttaagcttaaggtttatggtgttagtaatattgtactcatcctctaatgggtctttgtatataattttatttccactaactcctattccataatatttatcatcattctcaagaaatgttaagactctttttattttaaaattaaaatcactaaccttttccctaataaaataaattaatttttcatctatctctttttgttttcttttatcatcatttttttgagaaaaataaaccccgattgttatgagtatacccagtgaagatagaagagcgaaaaaagcagatagaaaagaaaaaattatgctcaacttatctttaccttgcgcgtcattggcaaatatatcaataacaaaaataccaaaaacaattaaagctattgaagctgttaatgcccaaaaaataatatttttaaactttgaagatagttcaatcattgtggataccattataaatataggaatcatactcacatccatgtgactaatccactgtcaaaatgcctccttaactcacattcatttgttttaatgcttcactaacggcatttaatcgtgattccattcttagatattgagggttgggaatagaaggccagtcgttataccaagcattatcaccaaacaagctaagcaacttaccgcctaaaaaactattgcaacaatcatctttaacatcatctgataattcgattaaatcccaatattcccttgcttcgtatttatctatttcatcatctttgcgtagtttgataacttgctttttagcgtatttagcatttgcatcgttatcatcatctatctcagagattaaattagaatctaatttgcctatccagtagtgattgttaatcctatgaataaactcaattagtgagctacccatcgagccccaaaagcaagaccatgaatcaccccattcgctaattgtgacacggccgtttttattatcgccgtagtcctcaaggtaaacatgaatagggtcgtgacgttctacacccgttatcactaatttagtcacttgagattgttcaactttcatcactccaccttaatcttctgtcttcacataccaatcaacaagattatcaattgcagtattgatatatcctgattgctcttcttcggttaatttatcccattcgtcctcagtaatgcccagcctacattcagagtcagagccaaccttgtttgtccttgcaactaaaaccatctgcttactcatgttcattcctcttattgcatccctgcgagttaattagtccagctgaatggcgccttcttctggatattcagtacagtaaaatacatgcacacgaccggtttctttatctttacgtggctcgatggtgtattcagtctcatcattaatatctaatccgtgaggttctacttttaagccgacaaaatcagccatagccattatttgcttcgttgttaatgtaatagtcatatctatctcctgtttgcatccttgcaaatattccctgagctatttaaatttacgctctatttcttccgctgctttattttcgtaataatcagccgttacgttttctattaaatcgtcctgttctctctcggataatttattaaaatcttcttctgaaatagctatagttagtgtcaccttttcatttgtgcttaaattgcgtattactaagttcatggctatatcctttggttaaacgggtagggattagaagggtatttgatcatcccaatcttgaggaggttcactttgtggtgtttgattactcgatgcttgtttttgtgcttgcggttgctgtggttgaccccatccttgattctgctgtgtcttctggcttcctgcctgattaccaccgttaccgcctagcatctgcattgttccaccgacattaactaccacttccgttgtgtatcggtcttgtccgctttggtctgtccatttacgcgtttgtaattgaccctctataaaaacctgacttccttttctcagatattcacctgcaatttccgctaattttccgaagatgcatactcgatgtcactcggttttctccttcatctcaccagtctgcttatcacgccacgattccgatgtagctagtgtgaggtttgctactgcgccacctgatggcatatagcggatttcagggtcttgccccaagtgaccgatgagaatacatttattcacgcctttacttgccatcagtacctacctcctcatattctccttcaaaaatagttgcattctcttggtctacattagcctctgctttttcgtctaaaatgaccgctttctgcatttcgatagagactggcagatatttaaataagcgacggataacggttttcttcgccatttcttcccagtgagagacccaaggcccattttgaccagccttacttgatgctctgactttctcaatttggttatgcgtcataacttcaaactggacaccgccatctttcagccttgcgacagcgtaaacgtgtgtaattggtgagtcctcattttcacccggcacgtgcgttaagttttcattcagtccatactcaaagtggaaactatcgccttgccttaccgttctggctgaaatgctgattatttgatttgagcgacgggctagatcaatcattcctcgataaccaataattaactgcacatttgattgtcctgacttggattttccatttccaaacgggagcaggtatgcatgaccaagtgcgttacccggctccaatcccaattgtgaacactgcacaacagctccgataaaactttgcatatcacagttggctaattctggtgtttttctgatttccgttgacactattcggatcattctatccggcgtcatatgacgaggaagggcggctgctagctgagctttcatacttggtttattgatacactcaaccaacaactgatctttggttttttcttttacctttgtaccttgtgttttttgcaagtcagcttgagctaatggtgggttactcatcccttaattccttagcccagtagggcagtgataatgtgcgtatgcctgcccattcgtccgtttttaggcattctgcatacgttcttaaattttgtttgtaggttgtccgaccaatatcttttgcttgttggtctaaattgaaaactctaacggggtatctaccgcagtcgatagtcgtgcttacaacaagaaagacaaagacaggagcttcgcctgttaatgatttatatccatctgaataaaaagagtcctgtacgtggtaacgatattcgtacatggagcgatcgaatcgctgaatatcggcagagctttttacatcaataatccagtggtgctcttgaatgagtttatctggcctgcaacgacaaagaatatccgtatcttcatcattccaataaatgctactttcagctactccgttagcttctaagcaccatcttgcgatagggtgcgccattgcactatttctcatgagcattaacttcctgttatcgtcatgagtaataggtgtgataccttccttttcacacatttcgagaaattccttttcctcttgcttccctgcgtttgttctacgatttacatcagggcctatcttgtatcgcttactgtattcatcgggttctaacaaaagacaatggatagcagtcccgaaatccaatgcctttattttttcttcatcaacaggagcttccttgctccaaatatattcggctggcatttcgcttattaaatccaactgagatttactgatccctaatccatggtgatagtcctcatttgaaatgtcgtaatagataccgggcttcatcctaaaacctctttatctatcccgatctgaatagctgttctaattccggctaaaaccgcatccagtgcttggggactaatttcaaatacaggatttaacttccttgctaaatccatgcacagtagttcttctggtaggctatccataacctcatcaactgatattttctcttcctgagaattaacaaacgcttctcgttccatttggcgttcgcaccagtcgtttctgagtccgtaggtgttggtaatcacgcaaccctccttagcttagaaactcgcaatatcctgttaataaagacttccttgcctatcgcattgataatcctttcaagcgattcatcgtcacaatcgagtacatattccattgcctcagctgagtctatttccgtcaatttagccaactcagtgaaacttcctgtctcaatactgagtttgctactttcgtcaaattccatgactgttttgccgtctactacccgagttccgttcgagtagctgtatgaaatttgcataatcacctcaacttacaaatgtcggtattacgccaacggttgttacaatgaccacagctaaactgaataaccatgggcttgtacgtttatttttacgtgcttgaggcgtagtgatacgcaccaccatgccgtcacgcatagcgctgtaatagttagttttcatggtgaccccgttagatgagagataaggcggttatctggtgttggcgaagtgaaggtgtattaatttatttttaatgatttgaattttattagtgtgtttttttattgagtaatgtatttataatcgctttttcaaatgatgatttaattgaattttctccaactaaattatctgagaagttatttagtaataattctaattctggagtttcttcatgaacgtatatttttgtttttacttcaacatgtggtgatttaattccatgttctaaagttaattttacgttaataacgacactggttttttgtttcatcatttttatttccttttaatgaatataattaattacgaaatgtcttgtttatatatctaaatatagggtgggttactgctgaacgagggatgtcatactccctccgttattaactaaacacgatgctaattatcaagcttgagtttttgaattaagttactcactgtggtatctactgcttcctgatcgatggtgtcgaatagcttgttgcgtgcttcttccgctttattacagccttcctcatcatcgtcgtcgtaatctatccataatccaaaatcgacctcgaaaagtttctctggccagcaatattgcatcccgatttttgactcatcggcgttatgagctttcttgattagaatctgacgcccgtgtgactcaaactccttaaaccatatttccatctctatctcctatctattaatcaactcaccacagcccgcagaatggactgtaattagttaactgtgcctgcttttaaccacatcaggcgaggtggttcttacattccccaacataagaaatctgtgtataattcaatcaccccaacataattaaaaggattgaattaatgagtaatagagttatctctgatgacaaccctgttaaacgagttgcttttgatatggcgctagctttagctgctaaacaggattctattaaaacccctgagcaacttatggctgaaattgaatcgctttaccctgagtgtttagaggttgctgagaagcaatacaaaaaagagactccacctccgatgggggttttgctaaaaagtacaatctaagactttaatttctctatctttatgtgatgcatttttaaaaactcttctagcggaactaattccataatggttgttccgcaatttagagttaatttagtgattggtttcccatctgaccaggtatcttcctttattgaagaaatactttctgtcttaaagaaaattcttgttccatcgtttcttagatattcatacatttttaagttaatcatgtttaatcctatctcgccgtaaccccgaacttactgctcggctgttttgttttaactcctgaatatactgctacattaggtaagcagcagttatcaggtgtgtttatttaggtaataaaaaaccccgcggctgcgaggctttagattgattggcgtaaatcaccattttttatttgggtttctttgatgagcatgatttacaactctattcataatgtcgtctttaggtggattgtatattttctcttccctttcttgttttggtagggatagctttttatgtaacttcaattcagaagttgttctgtaagctaccggaccaacaagcggaggaggtggaccgcacaaccccttgcgttcacattcatttatatactctagcgctttccttgccagatactcacctcttctaatatatcgccttgcttttgagtttcttcctttctcaagatagataattttagtcatatcaagccctcgccgtcacttccccgcttggcataataggcttgcgtagacgtaatttcttacgatgttcactaggtgtatcctttaaacaaataattaactctgacaatacatccgtttcatcgactggcttaatgattgaatcccatatttcctcagtagtgcgaccacgattcgcttcttctaaagctttgcgagccattaattcacctctagcgatataacgacgcatctttgaatttgtcttaccagtgcgcggtaagtaagtaatttgagccataatttaccctcggttagtaagtattggtgatgcggtcattggctatcagtctcgaactgtcttgtcagccttgcttgcatcctctgcaataacactactttatttgctggtcaccttcctaagttaatgatcaacagcgttgttattactcgacggactcacaccgtctgacattggctttgcttgcatctggttcagcgtaaccgcatcccaatactcacttggagttttgaaactttcccacaatggcgggagttaatttgtaaaagagcgaacatcctgtttatctatggctccttgccttcgatgtgattaactatacaagcattactttattaagacaagtaaaacttgtgtaaaaacttgggttaatctttatttaaacaataaatgcttgtttttgtttgtgttattttttgtaaaaaatttaaattttttattctgttggcagtttttgtgatttgtgggcataaaaaaatccctcattaaagagggaactgtgatgtggtaggtgagaggtagctagtttttacttgatgttatttctgcgaaatccagtagtgctttctggcaatcgttggtcatatcaattaaggtgctgtttttcttttttgcctcattgctcatgaacttatctataaactcatccccatttggcacattattttcttgctgaaatttatataaagaagagtaagcgttgcactcagatgctttcatgattgtagttatcaatttgaagtcatcttcattagtgatatcaatcttattagtagcatgggcagatattgaagaaacagtaattagtaataaaattatatttttcatttagttactacctgataattaaataaatttctatccatgaaatttgtattttatagattggctaactaaaactttggcatgaatgtagaggctattgatactatcttcttctaaataccaagtttcatatcttgcgttatccgatatgacagccagtctcttatattgcttttgaagcctttttatatatagctgattatctaatacaaagacataaattccatcaccatcaaaaaagttagtggtgatatctacgaatatttgatctctgggctcaaatgttccagccatagagtcacctttaacagtgatcatcttgattgtggatgcagatctcccaccaaacagtctttttgcttcatctgctgaatactcaatagccgttattgtctcaataaaatcatcaagaaccatcacacctggccctgcactagcttggatatccagcatctccaccttgtaggtatttttatctgaaacttcaatatcttgatttatttgaatactactgactttgtttctttcatcaatatcagttattccgaataacaaccaattggtatcaacttcaagtatttcagcaattttaataactctgttttttcttggctcagtactggtctcccactgctgtactgattgtggtgacactcctaccaactcagctaactcagcttgggtcatgttttttgcaagtctagcttgcttgattctttcgcgcatagttttcattcgctcaatatacaagttgtgcttttatttttccaacaagtaatacttgcttaaataaagcgtttcttgtattcttcttgttgttaatcagttaaaggaatatctttatgaatgcattggaaacaacaattaaaaaagcaggtggaattccagctttagctaagaagctaaagattagcgatcaggccattagacaatgggagcaaaaaggtcgcattcctcctgcaagatacgctcaaatcaacgaactattcggaataccatttgagcatttagtaaaagataaaaattagtttcacccgctcttttcacaatttaggttccgccattgtggaacatatcaacaatccgctcatatggaatgagccacggatcattattgtcccttagttaactcataaggactttaaacaatggaatgcgcaaatacacgcaaacaattcaatcaatttatctctaaccacctaatagcttcagcattacaagcattgagaaataaaactcagtctgccgtggctagaacgttaggtgttcatgattcaactatcctacgtcgaactgaaaaatatcctgaaatatgcgaaacgcttgtcgcatcgggaattattgattttgtgatggaaggagaacgaaaaatctcagaagaagagtaccgatttttgtggaaacaaatgggtgaactttctcaaatgaaaataaaagaaaacgcctcgattgcggcaacaaacgaggcgtgttgttcaatggaattcaccatttaacgtacaaatatactgtatcaatatccagtttttatcacaaggggaaacttcagtttcctttttttgatacagctttggaatggagaaattataccatgagacaaagaataaatcatgaatttaatggctgtgatgagcataaaaacatcatgagaaataggctattacaagaaataaccccactgggttgtcagcgtttaaaggaagcattgaaagacgcaaaattaaggaaagcacatcgggataagttattaggagagcgaaaatgagtatgcttctaatggcaaaagccatgcaattacaggtggggagtacagcacaaaaaatggtgctactgaaacttgctgataatgccaatgataaaggtgagtgctttccttcttatgagactattgcacgtcattgcgaaattagccgtcaaagtgcgataaaccacattaaaagtttatgtaaaaaagggtttgttcgtaaagttacgcgaaaaactgataaggtgcatacttccaatttatatattctggatttggaggctaaatctcttgatgacggtagtcaaaatacagtaccacctagtcaaaattctgtaccagaggtagtcaaagaatttgaccacggtagtcaaacggttggactagggggtagtcaaaaatttttacccagaaccagtcagtcttttaaccagtcaattaaccttaaaaaactatcgtctgacgactcgaaacctgcaaagcagatttcaattaatcgacaagctaaaattccttatcaggaaatcatgcaagccttcaacgaatcggtaggggatagattacccaatgccgaatcactgaatgacaaacgcaaacgagcaatatccaaattcctgaaagagctcaaagaacccacagttgaatcagctaaaaattattttgattattttatggaaacggcgagtgcttggtattttggcgaaaataatcggggttggcgagcgaattttgattatttactcagacctgaaacggtactcaaaacaagggaaggagcactgtgatgaaccaagttccgaataatttaatggcggaacaaaatgttattggaggactactgcttgacccgcaaagtgataatgcgcaatcaattttttcactgctaaaacctgaagatttttatgcccgacaccatcaaattatttatctcaccctgcgagaaatgtatacccaacgtatgccaatagacatcatgacggtgacggattgtctggagtcaaaaggccgaattaatcaatcaggtggttttgcctatcttgctgagatggcaagagaaacaccgagtattgctaacattatggcttatgcgaaaaaaatccgagagtgttccgcacagcgttttgttatcgaaaagacggttgaaattcaaaagctcatgatggcgccaagtgagttaggttttacagataaaattgaacaagcacaacgcttgcttgatgaagctacttcgtttggaaaaatggggagaaaaacagggttacgccgaattgatgatgtgctggatgatgtttttaccgacatttgtgatcgacaagataacccagagaaacatcgaggattaaaaacgggatttaaagattttgaccgtctattaagcccgaaacagattgtcataggctcactgttcgtgattggtgctcgtccaaagatgggaaaaacaaccgttctcactgaaatggcaaaaaatgtctcacaacaaggtaagcctgtattactgttcagcatggaaatgacggataaacagcttgttgaacggacactagcccaacaaacccagattaattcagataaattttaccaaaagttagaagagcatgaatgggataggctttgcaatgccatcggtcgccttaaagatgagcccaatatttgggtggatgatacaccaggtatgtccttacagcatattcgctctgaaagtcggaaaattaaacgcaaagtcggtgatattgggttcattggtgtcgattacctcacgctgatgcaagcgggaaaagctgaccgtaatgacattgcctatggtgaaatcactaaggggctaaaaatattagcaaaagagctcaatacggtggttgtgttgcttgtacaactgaatcgaggattggaaaacagagctgataaacgccccgtaccaagtgattcaagagacacaggacaaatcgagcaagattgtgattattggttaggcatttatcgtgatgcggtgtaccacgataatgcagatgaaacgctgaccgagatgattttaaggctcaatcggcacggtaaaacaggcacggtgtatgttgaccaacaaggattgagtattacaccagttgatcaatatatggctgcttatcgcgctcaaccgaaacgagagcctaaaaggtattgtgaaaaatcgttttaactcatgaaagtaaaaaggagacctcgtgacagatgatatctgtctccataaatccaatctcaacagtattttcaaagtgctctccgaaatcgtgacaacaggtaaacgctatcgcatcaaaatcaccgagtggcgtgatttaagaaccatacccatgaataaaacatggcgtatgtggatggaaaccacaggcgagtggttacgtgcacgtggcgttgttatcgatattaaaaatggtgtcggtgaaatcgttttatcaaagcccattactaatgaggaaacgcatgaatatttcgttggacactggttagggcgcaatgaaaacggtgagcgtgaagaaaccagcaagatggataaagcaaggatgctttacatgatggagaaacatgaacaatggtgcattgagaagggaattccgatcatcattcctcgtaactctgaatatatgagtttgaaaagaaagcaagaagaataggaaatagtgatgattatttcagttaataacatgatcgtttttattttaaagtgataaaaaatagtaatcaggaggctcatgatgaatttacgcaatgaggcaaaagggcgtgaatgtcagattagaataccttcagtttgtaatggtaactctgaaacggttgttttagcccattacagaatgtcaggtctttgtggcgccggaataaaatcgcatgacttatttggcgcttgggcttgtagtgcatgtcacgatgaagttgatagacgaacacgatttacggatatggagtatgcaaaacaatgtcatctagaaggtgttttgagaacgcaagccatattgatccaagaagggaagttgaacgtgtgaaggtctttaatatcgaaccagtacctaaaccaaggatgactcaggctgataaatggaaaaaacgtcccccagttttaaagtattttgcgtttaaggacgaagtaaagttaaacaaaatcaccctacctgaatcacattaccacattacattcattctacccatgccgaagagttggagtaaaactaaacgctccgaaatgaacggtaaaccccatcaacaaaaaccggataaagataatctcgaaaaagcattacttgatgctatttttgacgatgattcacgtgtatgggatgggcgggtaacaaaagtgtggggaaaaagggggcagataattatccaagaggtgcgatagtgaatattgagtggatacgcgagcgagtaagtacagcgttgatgaatgtttgtattatagaaaatgggccgttaagtgccatggaggaacaagcaatacttgtaaccgataggtttaaaagaaacccaatacgctatgcgggtgaaagaaagtctcgatacagactcccctcacatccactcaaaattaagcaaaaacatgccaaaggaaaatcaaaaccattaattaatgaagttacttatcgcacttcatcatggcgcagaggtattcatcaattgcctaacgaaatgcgcttatggttactctattgctatggtgattatcaatattatcgtgagcaaatactcattgttccctatatttggcatgagtttcagcgattaaatagtaaaaaaaggataacgaaaaaagttaagcaacgacttcaatctcttaccttactagccattcaggcggtaaaagcagaaattaatcaaacagcaaaaaaatatacggatgttaagcttgctgaattgttgggcgtcagtgctgatgcttggcgaaagagctataaactgtattggatttgtttattagattgttgctatcaattagatagagattcgctattcaaaattagcgctttaagctgattaaaaaagttgcaaaactccgtttttttctataaattaaatgcaatatttatataatattataaatgtaagtatttcaaacctcgcttcggcggggttttgttttttttaaaatatatttataattattaattaaaaaatttgttggaagttttttgttttcattgattgtttgtttatatttaagatgaaatttattgttatcctataagaataaacctgcagtgtttaactaataattaaaataataaacaggtattcttatctctactatactcataatattcaatttatagagcgagtatatataatgattgatttgtttaagttaacgaaaaaaagttctaggcatattggtatagcaatatatgttggtattatagcgggtatcttttcagctttagttaaatctggttttgaagacctaattcccccgagaacacttgaaacgacacccccgccagtcgtcttactcgaaaagcttggattaaatatagatactatgacttatcattggatgggatatagtattaattggggcggtaatggtgttcatatattattctcaatagttatcgctgtgacatattgtgttattgctgaattcttgccaaaggttaaattattacacggtatttgttttggtattggcgtttctgtttttgctcatggtttagtcgtacctctactaggattgtctggctggctttggacagcaggttatcaagcattaatttctgagtttgttggaaccgctttttggatctggtcaattgaagcgattagacaaaatttgcgttattgtttaactaaagaaaatgatgctgagtagataaggaagttcaaccttaatctgttataaatttcttaaagatcgcttaggcggtcttttttcgtatatgccgaccacagaatcaatcaccctcgttatcacgttcacacaagagctgtgagtcggcaccttattaactaaataaattggtaaatgttatgtcaaaagagataagcgaattacagtttagtcttcactatgcctcagaaacagacagtgaaaagaatacctccatcattttaacggcgaatatccatacggctgatggtgaaactcaacaactgacacaattaatttgcacgacatcttccgcaggtaaaaagcaatatcgaatcggcttgcaaaaaattagtgatgctggtgctccattgctggtggcgattgaatcctattggcgcaaaaacacacaagagagttgtgtttatttgttagagaaagcgaagcaatttattcaaggacacttacaacaaacgaatacatggatatctatgtatggtcttgtgattgtttctaatgcgtcactggaagaacagttgcctgaaggtttattaaaggcacttaaagtatcaatccccgcctaatttttttaacactttcacactaatcatcaacggacactcctctgggggtgactatgcgtatggaaaaattaaccaatgtaacttatggaacagcaggcctaacggccttttttgccagtctctctttatatgaatgggtatttgttatcgggatggcgttcagcatgcttctgggtttagccacttattttatgactcgtcgagaacaacgaaaacgcactcaattatttgaagagcttgttcgtcatgttgacccacaaaacccgaccgaaaccttaaaaaagcttgctgaattaatggtgaaagcgccaaaggatatttaatgtctctcaaacagaaaatagcggcgctaacaacagcaggagcaacagccatcgcgttagtagtaatagcccattttgaaggtgtacgttatgaaccttatcgtgatgtggcaggtgttctaactgtttgttatggacatacaggcaaagacattattcaaggcaagagatacacacaacaagaatgtgatgcgttattacaaatcgattttattaagacacaacagcaagtcgatgcattaatcaaagtatcactcgatgactacaccaaagctgctttatattcctttgcttttaatgtgggtacaaccgcatttgctcgctcaacattactcaagaagctaaacgctggtgatagagcgggtgcctgtgaagaaatgaaacgttggatatatgcaggcggaaaggtctggcgagggcttgtcagtcgtcgagaggcggagtcagcactatgtcatggaaaactttaatcatcattatcggctttattcttgcattactcattacagtcgctggtggcatttatctcttgattgataactcatgtactaaagaccaagtgagtttagaaaagcgctgtcagattgcactctcatatcatcggtactaatcatgaaatacggaaaactctatgccgtcattgcgatggtaggcattatcgtgggtagttattgggtgattaactggcaagctaataggattaattcactgacagatatcaacaaaaaactggccgtggctctcgaagaacagaagtctattaatactgactatcaagcacgcataatgcgattaaatcagttggatattcaatatacgcaggagctagcgaatgctaagaatgaaattagtcacttgcgtgatattagtgagcgtcatccagagcgggtgtacatcaaagccgagtgccccaaagtcaaaaccactccctccaccagcttggcttatgcaaccaccgcccgacctactgacaccgctatccgaaattattggttactcagagagcgaattgcagagtcagaacagatgattaaagggttgcaggattatatcaaacaagaatgcatggaataaaaaaaagcccagcatgggtgcatgggcaaactaacaggatattaatcaaagtatagtgataattacttagtatagcttaagtaaatatatatatcagcaattagataagtcgtttatccattaaggagagtgatcatatcttgactgctaggaacagactagaagtggcttggcagtgtatcgctaagctgcgaactctacgcatttcattctgtgcattcaccgcgcaattaaaaacactcacagaaccttacagaaagtcgaacctgagaaaaaccgttaatggtgttttctgtggggcggttatttctggtgaacaggttcgcttttctataaggatttacaccatgagcaaatcattagttttcaaaggtaatgaaattactccatttgataatggtgataataagatttggtttaccagctctcagatggctaagctactcgaatacaaaaatgagaagtcagtaaccaatctatataacgccaacaaagacgagttttctgatgatatgacaatggtcactgaaacaatgaccaatggaataaacaacaacttacgtaagaaaaaggtcaggatcttctctgttagaggtgcacatctaatcggaatgttagctaatacagatgtagcgaaatccttgcgtcgatggttacttgatctagctgaaaaagagtcaaaaccacaaacagggttagcaaaccttgacatgaatgagcttaaaaccctgactatcaatgagatgcaaaatagattagtagcagccgataactggtcgttcgagaactttggcaggaaaggtagtgacttaatgaatttacgcaagcgtcacctaaagaaaatacgcaaagcgaagaaggcaattaaagaactatcacaattaaccttgcctgatatgggcgaatttccagatggagaagagccagcatgaaccacgaacaattcatagagcagaacgtactagccgagttaaaaaagctcggcttttctttacctgtttgtcgtagagcaagttacatggcggtagatcattatcgccgaagctctcaagcaagtagaaaagggcgaatgtttgacgactgcttacatattgccaaagtgtgggcgagtaagttcgctaaggagaaagtatgaccaaacaagaaaaagcaaacttatccattctctatcgtcaattacagcaatcacttgaatacttacactgtggaagagttgatgatgggagaatagttgctgaaatcgtcgagcgcgagttaggcaagttagtcaacaaacagaaaaccaaataggccctagcggccttttttatttaaggaatggatatggctaaaagaccagattgggaggccatcgagtcggcttaccgagctggcgtgatgtccataagggaaatagcctctcaatacgagataacccatcaggcgataagtaagcgtgccaagaaagaaggatgggagcgagatttaaaggcaaaggttaaggctagggctgaaaacttggttgccaaaagggaggttgccagtctggttgccaccgaaaaggctatttcagaacggcaacttattgaggctaatgccgaggttatcgctaatgtccgcatggagcatagaggcgatattcgaagggctagagagttaactaataacttatttgatgaactatctgctgaatgtgctgatgtgccagccttaagaaaacttggcgagttaatgtttagtcctgatgataacggacgcgacaaactcaatgaaatttatcactcaatcatctccctgcctgagcgcgttaagtcagccaaatcattaagcgaaacatttaaaaatttagttggccttgagcgtcaagcatacggccttgatgatgttcagccgaataagacagctagtcagctatcagaactaatggacgacttatctaaggaataatcatgaagccagaacatcttgcattattgagagataagctctggcgattaaatcacctctactggataaccaataaagaaggcaagccagttcgatttaaaatgacgcctgagcaactcgaatattttgaagggatgcacacgcgaaacattatccttaaagcccgtcagcttggcttcactactgaggtctgcattatccagctagacgcagcgttatttgaggcggctaaatgtgcattgatagcccacacacttaacgatgctaagcggctatttagggaaaagataaagtatgcctatgacaagctacccgatgaaatcaaagcggctaacccagcgagtaatgatgcggttggtgagttggtgtttagcaaaggcggctcgctttatatcagcacgtcatttcgtggcggtacactccgttatttgcacgtttctgagttcggtaagatatgtgctaagtatccagagaaagcccgtgagattgtcactggcgcatttgaggcggtatcaagcgattgttttacgacgattgaaagcacagcggagggtcgagcaggttatttcttcgattattgccagtctgctgagaaagcgcaaattcagaataagactctctctaacctagactggaagttctttttcttctcatggtggaagaatccagagtatgccattaaccctgttgagccattaccccagcggttagttgattactttgatgagatagccagcaaacatggtgttcaattaaacgagcgccagaaagcatggtattacgccaaagagaaaacgcttggcgacgatatgaaacgggaatacccgtcaataccgtctgaggcattccaacaatcggttgaaggcgcttactacgccaagcagttccgcttcctgtacgaaaataaacgcattggcacacttcctgataactcgcacttaccggttcacacgtactgggatattggtgtgggtgactcaacgtcaatttggtttattcgtgaagtgggcgaggagttccacattatagaccactactcaaacagtggtgaaggtctacggcactacatgaaagtactgaaagacaaaggctacacatatgcaagtcacaatggccctcatgatatcgataaccgtgagtttggctcggatgcgaaatctcggcgtgaattagcgcgtgaggggtacgaaatcgacggacaaatttactcaatccgatttgaagtagtgccgaagctttcagttgatgaaggtatcgaggcagtacgtgaaattctgccactttgcgtgtttgatgagcataaatgtagtgaaggcattgctcatctagaagcttatcgtaaagagtgggatgacaagcgaggctgttggaaagataaaccgcttcacgattacacgtcacatgatgctgatggatttaggtattttgcggtgagcagaagaaacactaagcgcccagcattcgaaattaacctaggaacaaccttctgatgagtacaacaaatgtagatttcactcgaccggagtataaaacggctgctcctcagtgggagttagtgcgctctgtttgtcgaggtggtgaagatataaaaagctatcttcctgagcttgaagagcaagatagtgagcgtaaaaagaagcgcaataaagattatcaagaccgtgcggtgttctatccaataacgggcaatactcgcaacggcatgatagggatggcatttaaaaaagatcccttagttgctgtcgtcgaaaagctgtcgtgtttaaaagacgatgctgacggggcgggttcaagtatctatcaattggctcagtcttcacttgagtcagtattggaagtcggtcggcatggtctgtatgttgattacaacagtgattcgaaactcccgtacatattccaatatcgtgctgaagacatcattaactggcgtacagctcgtattaatgggcgcacgatgttaacgctggtggtattgcgtgaaacggtggaagaagaggacgggtttggttttaaggatgaggttcaataccgtgtattgtcgatagaagaaggtaagtttgtctgtcgtgtctatcgcaagcccagtggaagtagcgtttttgaaatttcttctgagtatatacctgcgcgtgctggtaacggtgtgtggaatgaaattccatttacatttattggtgcacagaataatgatcacactattgatgaagccccacttctaggattggcaaaaatcaacctagggcattatcgaaactctgctgattatgaagattctgttttcttctgtgggcaaatacaaccttatctaggtgggctaggaacagaatggcgtgactatctagaaaagaaaggcgttatggttggttctcgctcaccaattatgttgccagaaaaaggtttctttggttacgctcaggctcaacctaacatgctggcaaaagaagcaatggacagtaaacgcgattatatggttgcgctcggtgctcaattggtttctgctgatagcaaagttaaaacggttattcagtctgtcggtgaacagaacgcacaaacctctatcctgagcatctgttgctctaatgtttccgatgcatgcagtaaatcgctaatatggtgtgctgaatacttaggtttagatactgcaggcatttcgtttgagattaacaaagacctcgttaatcacattgccgatagttcgatgatccgtgaaatcgtcgcagcatggcaatctggcgcaacgcgtaaatctgacttagtgagaagtttgcagaaatatgatgttatcgaccccgctgatgatgttgatgtggtggtggatgagcttaataatcaagagccgacaatggtaggtgagacatgagatcagtgaatgagcggttaatggatgaattgattgctcactccctgttttctggtcgctattctacaggggtggctagacgcatgataaaggcacttaatgagtttgatgctgaattaactgcttcacttatagtgtctttagatgatacctccatcgatgttaatagtttcactgcaaggcgattggagtcgttgctgtccagcgttagaagtattaataagcgtgcagttgatagtgctttttcattgttaacagaagaaatgagagcgcatgcattatatgaggctggctactacccatcactgtttgatgctctactacctgatgttgttctacgcaaatatccactaatgagcattacagaggaaatgctattttcctcagtcatgtctcgcccatttcaagggaaattactttctgaatgggctgatggattagaatcagatcgcatgacacgcataaataacgctgttcggaatggttatttaaatggtgatagtgcggtagaaatcggacgtaaaatcagaggacatgcaaaccaaggttataaggatggcgtattgcaactaagccgagctaatgcgacgacaatagctaaaacggccattagccatttacaagcaacagcgcgagatcagtttgctgatgccaataaagacattcttgattgtaaacaatggttatctaccctcgataataaaacatctcacgattgcattattcgggataggttgagatacacgctggaaggtaagcctattggtcataaagttccttatctacaaggccccggaaaaatccacttcaattgccgctcaacagaaacgctggttaccaaatcgtggcgtgaattaggtatcgatttagatgagatggacgcaggaactcgtgcctcaatggacgggcaggtgccagcagataccaattttcttgattggatacaacggcaacctgaatggcgacagcgtcaagttttcggagaaacgcgattcagactaatgaaagagggcggtatgcatccttctgagttttataccgataagggagagtttatttcactagagcgacttagagagatagatgggcatgcatttagagaggctggatatagctaatcaataaaccatttaacaaggtcacctcggtggccttttttattacctaaactcagctcagggctgagttattacaacgcgctaggcgcatctaatcccaaggggaatcacatgttatttatgaatatcgaacgcaaatattattcacaggctgatgatggttcgcaaggtggaggtggtggaacaccggaaatcactccagaaattcaagctattatcgaccagcaggtttcagggctaaaggctaaaaacagtgagttgctaggcaagctcaaagagcaaggcgataacctgaaacgttttgaaggcattgacccagacactgtgaagggcatgcttaaacgctttgagaatgacgaagaagccaagctcattgctgatggcaagattgacgaggttctcaataagcgcactgagcgtttgcgtggtgatttcgacaagaagttaaaagaagcaagctctaaagctgaaaaggcagaggcgtttgcaaataaattccgtgctcgtgtgttaggcgatgaaattcgttttgcagcagggaaagcgggtgcattaaccagcgctcaagaagatttaattttacgtgccaaaggcatttttcagatcaacgatgaaggtcaggccgtagccgttgatgaagatggcaatccaatcatgggcaaagatggtcgcacgccattatcacctattgaatggattgaatccctaaaagaaagtgctcctcacttattccccgcagcctctggtacagatgcagggaaacataaacaaggtggtgcacattttaaacgttctcaaatgtccgccagtgacaaggctgattatattcgccgatacgggcgtgacgcatatttaaaacttccaaaagagtaaggaaatataagtaatggctacgatgactaataatgatttagtaatttataacgatttagcacaaactgcgtttttagaacgccgtcaagataatttagcagtatttaatcaggcatcaaacggcgcaattgtgctggataacctttttattgagggggacttccgtaagcgtgcattttatcagatcggcggttcgattgagcatcgtgatgtaaactccacagcatctgtagagaacaaaaaaatcggcgcgggcgaatctgttgatgtaaaagcaccttggaaatatggtccttatgcaacgacagaagaagcatttaaacgccgtggccgtgatgtatcggagttctctgagttagtgggtaccgatgcggcagatgcttcactagagggttatatcaaatactctttagctgctttaggtgccgctattggcaataacaaagaaatggtggtgactgcggatattgcgacagatggcaagaaaacactgaccaaaggtttacgcagatatggtgataagttcaaccgcgtaaatctgtttgttatgcactcaaccacctacttcgatattgttgatcaggccattgacaacaaagtgtatgaagaagcgggtgtggttatctacggtggacagccaggcacattaggtaagcctgtgctggtaacggatacagcgccagtagatgccatctttggtttagtgccgggtgctgtgactatcactgaatcccaagagccgactttccgatcttatgaaatcaatgacaaggagaacttggaagttggttatcgtggtgaaggcgtggttaacgttggcgttctgggctatagctgggatgaatcaaaaggaaaaaaccctgatttaacacagttaggcaccgcaggtaactggaagaagcatttcactagcaacaaattaaccgctggcgtcatgattaaactgactgccgaagagggaaagtaaccctgtcagcggataaaacgtccgctatcgctgacagtacagatacagtaacgatcactcttaattacaccaagggcagctctccagtcgaaggagctaccgttaattggtctacaacaggtggcaaattaagcgttacttcatctaagacgggcaaagctggtggtgcgacagtgaaattaacttctgattcacagggtgaatttattgtcacagccactgttgatggtgttgcacaaaatactgatgcaattacattcacagaaaaaacttctccagacgagtaatttaaggggctttgtgcccctcttttttttgaggtgagcatgattgatcctgataagaactctccaatatttaatagctacgcaagtgtggatgatttgaagaaatacgctgaggatagaaatatcactttggcagatagtggactagaggcattactaattacggcgatggattatcttgaatcgcaaaaatggttaggtaaacgaactaacctaaatcaacctttatctttccctcgctcagggctatctcgcgacggtgttgccatcccaagcgatcagataccaaagcaattaatccaagctcaatgccgtttagcgattgaatcagtagaaaatgacctacagcccacgttaggcgctgaaatcacctcagagcgaattgagggcgctattactgtgcaatatgccgaaggcactaatactggcgcaccaaactttccttggttaaaaggtttattgtctggcttgattgatgtctcggatggatttgccattaatacatttgcaatgaggtagccatgaacatttatcaacgtgggcagagtacagcattaaggatgttgaaaaaatatggcgtttcctatcaggctaagcgtgatggtaagcattgggttgatgatgaggggcaggaacactttgagccagaaacgttattttctgttgtcggggtaaaaacgcaatataaaccttacgaaatcgatggcacgcttattctctctacggatattaaaatgatacttcctccagatattgatattcagaaaggggataaggtgcttgtcgatggcgtttggttgcgcgttcatgaaccgaaccctgttaaacccgctgatattattatctgctatcagtctcaactgagggcgtgacatgtcagatcagttcatgaagtcgattaatatctttatcgacaaatctaacgcaaatattgaaacggttgtcaaaaatacagggtttaaaatattagcgaagcttgttgatatgtcacctgttggaaatcctgaattatgggaagttaatagggttgcctcaaactacaataaagcagtttttgaacataatgaatatctaaaacaagatcctaataatttaacaccaaagcgacgtcaattaaaaaagcgtgttcgtgttaatgactctatggatatttatgttcctcctggttatacaggggggcggtttagaggtaattggcaggtgtcatttgatgccccagcggaaggcgagacggggcgcatagataagtcaggcaatatgacaaaggcgttaggcaacgttgttattgaacaatttaaggtaggaatgaaagctatctatttcacaaacaatgtgccttatgcttaccgccttgaaatggggcattcgaaacaagcacctaacggtatggttgctgtgactgctgaggaatttagtcagtttttcaactctgccgtatcggaaactaaatcatgaatcagtcgacaattaatactgaaatacgaaagctggtggcgagcattggcaaggatttaaatcttaaaatcgcatggcccaatcttccttttaatgatattaacgatccctatcttcaactccatgtcatgccagcagaaacggataacatcgggttatctctggatatgcctgtttatcgtggtgttatccaaattaacgtagttgggaaagtagggggtggggacgctaagatatcaactattgctgatgacgttaaaaacagattagaaaatggattaacattaggggagggtatctacattaacggagagcctagccagttccctccaatttcagatgaaacaaattataccattcctattcgtgcatcctatcgatgtaatgcaatccgataacaccgcttaattgcggtttttttatacctaaaatagaggttaacaatggcctataacattcctaatgggtcgcgtgtttacgtcgcaagtaaatacgatgacgaaattaaaattaccgaggcaactaatgccgaagaagccgtactaacagttgatgatgtgggtgacattgctaaaggcgatattgttcatgttacatctggctggaaaaaagcttcgggtgctttccgtgttgcaagtgtcgctgaatctaaaatcaccttagaaggtgtcgatacaagtgataaaaatgtgtttcctgctggtggcggtacaggaacattaaagaaagtattgtcatgggaagtcatgccacaggtaatgacactttctacagaaggtggggaacagcaaactcaagaggttcaatttcttgaagatgagcaggcagaaactatcgatacctataaaaatggtgttgtacaggtttatacctttgctcacgatgctaagctgcctatccgtaaattgctaacaaaattggacgacagtaagcaagttactgcaatccgattcttcaataaacgcgcagaagaagatcgctattacacagcttcaatttcattccagcgtgtgccaaacactgctatcaacgaagttgaaaacgtaacagcgcgattctcacttaaatctgaaatgcagatttataccaacgcatcttaatcaataaatactcacaacagccccgagtcaggggctttttaaggactaataatgcctaaatttacactcgtcccaaatccaaccttcaaagctaacgttaaaattcctgttgccggcaaagaaaagccagaagtagttacattcacatttaaacatcactcagtaagtgagcttgatggaatgcgagaaaaaccgatttctgagttctttgagcagattattgctgactgggcgatcgaagagccatataacaaagaaaatttaaacatattgttagataactacccttcagcctctcgtgctatttcatcaacatattacaacgagctgctaggtaaccgcgaaaaaaactcctaacggtcgccgaggcgatgtatggcggaatgagttcaaaagaatcggctgagttcgagcgagcttttggctttccgcctgacattgatgatgttgaggtgtggcctgatgtttgggattcgtatcaagtattttcagccatgaatacacagtggcgcgtaggtatgaatggtattactggcttggattacaacccattaaaccaaataatggacttactcaacatcaaagatagagcgaccgtttttagcgatatccgcattatggaagctaaggcgttagaggtaatgcataaaaggtcataataatgagctgatcagtggtaaacgccggttggtgagtaggaagagaggataaagggaggctgcgagcaagaatgcagcacatagtaattagtttggcttaaagcttgacctagtaaataaaatgtggatcaagttatggacaagtgatacctttctgatatcataaaaatatagctatacacattgtatagtcatttcacttacaaaataataacggaggggattatgaaaaagttaattcgagaatttcttcgtgtaattctctcagttgaaaaaataaccaatccaattattggtggtaacgatcagaaatctaaagacgaaaaagaggctttagacaataaagataatttctttgttggtcgtgatggttcgatatcactaaatcctaacagtatagttgtccagaaggcttttaaagacaacatagaaaaattacagtcaacaaaagggcggtaattcttagtgtgggctgctgtaattgttctcgtcttggtttgtggctataactatgtagataatcatttgccgtcaagatataaactgaataattctgttggttggaacgcgtacttttttgtagcgctcaaaggcggtgagtttttaatacaagggctgatggcatctgttgtggttgccattggcctttatattattatgtatatattgaatgcgccatcttatctttttggttggtatgagcctttcacatttgtagactctattttcaatatcagagtttctggtatgagtttttggactatcttgtggttatcttttactgttttgatatctatcggaaagactgctgatgttaaaaaaagaaatcaatccctacaaaagagaatggaagactttagggaagtagcaaaagtttacgccattgaaagtttgctactggagtcatttgaaagaatggatgatggcttactggtttttgtgactctcaagtctagaaaggtttatgttggaatggttgatggcatcaggtttgaaggaatggatatcaatacgctagtgttaataccgttcatgtcaggatatagagagaaagatacattaacattccatgttgagcacaactacacagatcactacgcgcaacaaggaataaacttcagctcagagccgttatcagtattccagtttagacatgtcttaccttatgagcaaatagagtcattttcgttatttaacgtcaacacatacaatgtatttcaagaagtagcaaaagaaaaagagataaaaaagaaatcagaaacagattcaaactaacccactccggtgggttttttgttgcctgaatatctcaaattattgatattgtttgattgttctaaattgaaatgaccgacctacaaaataattgtaggtaactacaaaagttttgtagttcaaatattgagcgactcctaaagggttttacaaaaaagttgtaaaacttatcttgtgtaatttattgatatagtttgattataacgaatcgttagaattgatagcccgtccttgggcgttactactattgttatgcaattaacggagtgtttaaaatatctccgcttttctcaccttgcataacttgggtgcgtagacggaagttttgcagtaactcaataagcgcattagagtcacgttgtaatttttgaatgtattcaacactgacaacgttatgaccatcaacgctaactacttgttgcttttcatttttataagaaaacaaccatcttccctctttgggtatggttacagtgattgagttttgatttggctcaaaaagtatattttcttcctgtttaggaatgtattcaccctcaagaacgaacttgtgaatatactcaaccgcatcgggtatctgatctgctgttagctcttcaatgctactaacattaaatttctggtgaacaagagaataggcttctgggtacataatgcctttcttactaaccagtagattaacagcattctttaatgggttgcgttcttgaacagttgatttgtgttttttcttaacttcaccagtagtccaatattcataaagtacgtcgtcacactcttcttgatacttgattactttatcgcggatctctggtttgactttgttagggctgatagtgtgaagccagcctgcaagtttacggagagctaggcaaagcattgattgctcaccgccttttgaaggtatcacgatttccgtgatccctttactaaacctttgttttagcttttcaaattgagattgccaagttaaccccatgccttcaactattggcttcattggtacatatggttcgccgttgaaatttactacatacaggttgttaccgtggaaaggtacgttaattgttgatacactagtcatgtcggttactccgtagtttctgacaaattagaagccctagctaccgcaaatagttggggcttcgctgttttagttgacacgtttttctctttctttcacataccaagctatcgcttgattaactattgagttttgcgaaataccatctttcgctgagagttctaccactttactttttaacacctctgttaatctgagttgaaattttcctgtttttttattggtattcatatcttcatccttttatgtgtctatgtgacatcacaaagatatcaatgtgaatctatatagtcaacgaataattgactatattgtgatatcacaatgactttactggtggttgtatgtcacaaaaaaatacgagaataagagatataacgccttatagccttagaatgcctgatactctgaaggaaaagttaatgcaaagggcaagtaagaatgggcgatctcttaatgctgaaatggttatgattcttcagtctgccgtggatgaggataacacccctaaaaacttaaacgagttgtcacagcttgatcctgaaaagttcaaagaactgttcatggaaactatcaagaagatgaatgagggtaaaaagtgactaatatcacattttattttgttgttactgtataaaaaacaggaatgtaaaattttttagtgcctgtaatatattttgatattttctttggagcttgcacatgaatgcgcctgtaattagctttattaatatgaagggtggggtgggaaagaccactctatgtattagtattggtgagtatttagcaaactataaggataaaaaagtattaataatagatattgatcctcagtttaatgcaacacaatcttttatgggtaagcatgataaaataagtgagtacttatctttagtaaaacaaagaaagacaatcaagagaatatttgaagtaaatgcttctatatatgatgaagatgcagtattaaaaaaagaagatgttatttacagtgtatatccaaatctagatataatccctggtgatataaacataatgtttgagcataacacggtagatacaattagattgattaggataagaaatttcattgaagacaataagttaagagaaatctacgactatatttttattgattgtccgcctaccatttcgatgtataccgaagcgtccataatggcatctacacattatataatgccaatgagaatagatcagtattcagtattagggagtaacaatttgctatcaattgtttctaagctggctagagatcaaagacttacaataaagccgttgggtgttatttataccgatactgcaccaaaaagattgaccaagaagaccagagcaattaagacggctatagaaaccgaaaaaggaatcagggatctatatttcttcaagaatcatttttcaaaggttagggatttacaggttggtcagcaattaaattttgcgtcagcgtattctcagtctaaagaaatcattgatagaatatgtacggaactcgaggctaagcttaaagaggttgatgatgaatcagaataaattaataactaaaaagaaattaatggaactaaaagattctgaatcgcttgagtttatgatcgggtttctatctttagtaatattttccaaagaaatttttaagtcgaattttgaattgagtgaatttattaaagatgcatttaagatagaatataaaagatacgttgtatcctcaagaacccttatgttctctaggcttgcgaaagatatagttagaaaatattctgatggaaatcatttcacagctaaaaatactgttgtcaatatcatttatgaaaagctagatcagctgccaatcaacgatatcgctttagaagcgaaaaagaaagaaaataaaaagagaaaaggtaaaaatactacaacagaaagtatctcaaagtggataaaggggtttaggggtgagtaacttccttactattgacccttacaacgtgttgggaacagtgtccaagttcaaagaagacctaaaagtaattcctgaccaatatgttgttgactcgttaatatcagcggtaaaaaagtctatttttttgaagataattcacgaaaaatctttgagaggtaatagacacttattaagcgtcatctatgattttttaggttgtatttcagcaataaaaaaaaatgaagatagatacttttattttaatataaggtcatgcattgaaaattcaattagattcttgttgaacaaagataatgatgatgagatcggtgttacaaggatgttcagtgagtttaaagaaagatataaaggtgtagacggtgttagcgcacttactagggtatattctgatgcatgtaattacgttcataacaatgtcaaggctgatattgatgtatcaaaaagctataaatacattgattcatccaagatttttgaaaagaaaaaaagcagaaatctatgtaatgacctcgtttcagtgcagtcgtcactagataattttttgctaattaataataaagaagacataaagtattcatttttatatctaaatgaaaatatagaatatttaataaataaaaagtttttagaaagattgttctcatcagaattggtatcataattctataaacatgcttcggcaggttttttgtttgcttcaatttgcgactacactcagctaacattaagaaaactaaataaagaactgagaggacgggatgaagaagttattgaatattagtggggtgattgctttgctggttagctgcttgttttttagcacaacaacgttagcagtagagaaaaaaatatcagccccatttggattaaaatgggggatgacatacagtgatgtgctcagcaaaactggaaatataaagttaattggtaatgaaaaaaatagagtgaaagagtatctcatcaaaaatgattcctcattaattgatggtctggatatgtacagtgtaagtattgacgataagtatggattaattaatgtagatgcattgatttatgtgtatgacgatgatgatagtaaagttattgagaaatataacatattaaaacaagcattatcttcaaagtacagtgaacaatattctgaagaatacttatggaagaatagaacaagaggaatgcttactctaccagaatgcctaaataatgagggttgtggtaaatatgtatctttgtttcaaggtaatgactccagtagtgttatgattatgttgaatgccactggcgataataggtcagttattatatctttgttttacaaatctgaatttattgaaaaaataaaacaagaagaaaaaaaacagaatgaaataattattaaggaaaaatcagacgctttggcaaactctctataataccatattctaaaatacaaccaccttcgggtggtttttttatatctggaggaaattaaatggcagatatagcaacaatatcattaaaggctgatacgtcagatctggagcgtggcacacaaaagttaaaggagttcggcgatacagcagagaaggtaagcggttcttcgcgaaatttaaatgaccagtttaatagaggggttgatcatcaaaagagagcagccgacgcgataaagaggcaaaagaaagaacttgatgatttattaaattcaataaatccaaccaataaagcatttgatgcgcttgataaagccactcaaaaattaatagaggcaaataaaaaagggatattaccaaaggatcagtttgcagactataacgccatacttgagcagactagagataaattaacacgagttaatatgtctcttacggctgaagggcgggcgctattagctcaagaggcggcaacaaatagagccaagcaagctgctgatgattttttaaattcactgaaaaatcaaactgaaattataggcaaaacgaggacagagattttagagctaaaagctgctcaacttggtgtgtcgcaacaagctgcgccgatgatcaataagctaaaagagcaagaaaaagcctttatgaatggctcaattaccattggtcaatataaacaagcaatgcgtcaacttcccatgcaaatgtcagatattgttacgtcattagcatcaggaatgccagtctggatggtgatgatacaacaaggggggcaaataaaggactcatttggtggtgtcggtaactcactaaaagcgttagcatcacttattacccctgcaagagttgctatgtttggttttgctggtgctgcggcagctgtggcgttagccgcgtataaagggtcgcaagaatttggcgagtataataagcagctaattcttactggtggttatgcgggaagaacagcggcacagctagatgctttggctagaagcttgtcggggaatgggatcgctcagtatggaatggctgatactatctcaaaagtagttggatctggttctttctcgggtcgagatgttgatatggtatctaaaactgctgctgctatggaaaagaccgttggtcaatcggttgatgagacaataaagcaatttcagagattgcaagaagatccagttaaagcggtcactgaattagataagtcattacattttttaactgctacccaattagaacaaataaccacacttcagacgcaaggaaaagagcaagaagcggctaaaatggctatggaatcatatgccaatgctatggatgagcgaaccaaacagataaaggaaaatctaggccaccttgagagagcgtgggaaggggttaaaaacatggctagtagcgcatgggatgcaatgctagacatcggcagagagaatactctagagcagcaaatcaaagagtatgaagaagctctgattgagtttcaaataaaccctgcctccaaggggctgtattataacaagactggattaatgccagatgaagttaaaagtaaactcgctctactaaaagaagaaaaatttcaacgtgacattaaaaacgcaagagaaaaagccgcaagagatgaggaagagcgtaaaaaagcgcagtttagagccgatcaagaattaaagcgacaatacgaaaccgcagaggaaaagcaccaaagactactcaaggagataataaataatgcggatgcatctcaagctgcaaaagatgaagccatccgccgagagaaagagcgttacgagaaagaaaaagccaaaggtaaaggtaaaaccccaacctaccgaccagattatggtactagagtagatgaatcagcaaatcaagccctattatccctacaagcacaattaaaggtgctaaaagagcataaaacagtcagtgatgtgattagctctgagcgtaaaaaactttgggatatggaagcgaaaatatcaatccttgaggaggctcagaaaacaagacagttaaccaaggacgaaaaggcgttgcttgctaaaaaggactacattcttgcttctcaagaagcattggccatagctggtgatgaggttaagcttcaggagttacataatcgtgagttagataagcaacttaaacgcgttgaagaaattaatgccagaagtcgcgccttagagttgggagctggtaagtctggccgcatgtatcaacgagacatcgcactagagaaagctaaatcaccagacgagagaaaagccttagaggagtattatgctaaggaagactctattcgtgctaactgggagttaggcgtcaagaaaggctttgctgaattccaagatcaggcaacaaacgtttacggtaacgtagctcaaattagtcaatcagcattccaaggcatgagtaacagtctctctgattttgtattgacgggcaaagctaattttgctgacttcactcgctcattcttagaaatgaccaccaagatgttaatgcagatggctatgctaaatgctatgaaagcggcatttggtggtaatgcggtaggtaatttctttgggtttgcaagtggtggttatacaggcggtggtggtaaatatgaccccgctggcgtagtgcataaaggcgagttcgtctttaccaaggaagcaacgcaacgattaggtgtagataatctctatcgactaatggatgcaggaaagagaggttatgcttcaggtggtcatgtcggtggttctgcgccaatgtcggttacacagccaacagcatttatcgctcgcaatcctcaaattgctggtggtggggtgaatgtgacaattgatatgagcggcgtcaagattgaaaccgaacagcaacaaagtgcaatgccaaatatagatgtgagagctgctgagcaatcgttaaagaataaagttaaaagcctttttattagtgaagggcgagaaggtggtgatttgtacaagatcattaaagcagtatcaggaaatagataatcatttaataagagaggtatttatgaaattaaaattaggaaatatttgtattcgtccagaagataaagaaattagcattccagtagatgtatacatgggaaatgaagctgattttgaaccaccaaaagcatatctggtttatcaaactagctttgatgctaataagcctctttcggaatattttaaagaatccgaagaatatgcaagaaaaacaattaaagaattaaaccaataacagccaccaaattctgtggctttttaatgagaggtagttatgaaaatcaaagtagagttcccattgttatcaaacaaattttcaggagtggaaattacaggggatgtgaaaagatatggcattggggctataaaaataagtgaaaaacctatattaacgtcagaaattacagtaacggagatagtgggaaataataccccagatgaagaaccaaagttacaatttaagtacacagaggattataacccaaatgaaacatttgcttcatttatggggagagcggaaaaatatgcaagaaccatgatagatcgcataaaggcggcacagtaaccgcctttataatatggtactaattatgtaaatgtgactgaatgataccaaacgcctcgatagttacaggactatcatgcgatactttatttaattcactaataagtttttctttttcaatatcagacatattcctaatcattacttgaattatatactctaaagcaagagtacgtgtttgaagggtctctatgtctttagccatttcactaactaacatattcaattctccatcgaagtaagtcagccattccttcggtaagtttctctgggctgaatatataaaataacctaatggatatttattaatatcctgatatttgatcaggcggctttgtgtcgccttttttattggagtaaccaatggaagagtttaaatggcgaacacaaatacaagattcgccaagcggtgagttcaagcatcgtattaaagaagttgaatttggagatggttacaaacaagttgctggtgatggtattaatccagaatctcaaacgtggccattctcttatatgggattgaaagatgaggtgatgcctatttttaaattcattcggcaacacacagtaaaatcatttatttggacacctccatttggtgaaaaaggtctttatcgagttaaagctgattcaatatcgatgatccccatatctggcggagtaatgaaattgtcagctacgtttgaacaggcatttagcgcatgaatatcacagcagatgtacaaaaattagagccgggtaataaggttcaattaattgaggtggatggcagtggttttgatgggccaattcttcgcttccatgcttacaatcttcctcacacaccagaagagatagagaaatctaatggtgatatcaagccaaaaccaatttggtggcaagaaaatgaatatggggcatggccctatgaagttgaaggaatggcaaagaatagcgacggaagcccagcgagaccatctctaaaggttgccaatatagatggcttaatctcatctttgtgtctccagcttgacgatatggtgcaagcaaaggttactatttatgagacattctctcattatcttgatgccaaaaattttcctgatggtaatccaaccgctaaccctgatgagtgttttaaacaggtttattacatcgatcgtaaaactaatgaggtggctggcgaatccgtagagttcgagctgtctagcccgtttgatttgcagggagtaatgatacccgttcgacaaattcataacctttgttattggtgcatgaaaggcgattatcgcagtggtaatgggtgctcatattcagggaataaatattttgatgagagaggaaaccctgttgatgatccagcgctagatagttgtggtgggcttattagtgattgcaaaaaacgctttggtgagaatgagccattagattttggagggtttcccgctgcggggttaacgagatgatcacaaaaaaattaagagaatcgatatttgaacatgtaaaagccgaatatcccaaagaagcttgcggaattatctgtcagaaaagtcgagttaaaaaatactttccttgtagcaatctttcagataacccaacagagcattttgagctttctccagaagattacgctcttgctgaggactggggtgagccaatagcaattgtgcacagccattgtggtgatggtgtaacgactcaacctagcgaaatagataaattacagtgtgatgcaactggattgccttgggtgatcgcatcatgtccagagggtgatattcgaattatttaccctcgaggtgagcgtgaattagaaggacgtccttttgtgctgggttatgctgattgctggtcgttaattatggactattatcaccaaaaacacggtattgagttacataactacagcgttgatcggcattggtgggaagaaggcgaaaacctgtatacggataactacgagaaagcgggttttgttgatatcgctggtgaaccaaaagaaggtgacatgattatcatgcaagtgcaagccgatgtacctaatcacgctggtgtgattatgaatggcatgttacttcatcatctttatggtcaactcagcaggttggtcccctacagcgattattggcgagataggactgtaaaaattgttcggaggaaagagtttgtatgagcctaaaaacaatacgtctatatggtgttcttggcgcaaaatttgggcgtgaacacaaattagatatagattcacctcgcgaagcaattaaggcactctctgtgctttatgatgggtttgagctgtttcttgctaatgcacatctgaaagggctggagtttgctgtatttaaaggtaagcgcaacattgctgaagatgaattacatcttgataccaaagaagagatccgcatagcaccaatcattaaaggaagtaaacgaggaggattctttcaaactatgttgggcattgccatgatcggtgtcgcgacatttgctccttggggtactgccttatttgcaagtgacttgattggggccataggtcttggtgtggcgcttggtggtgtttaccagatgctttcaccccaaccgcgaggtctatcaatgaggcaagattcagataacaaaccatcttatgcctttggcggagctgtaaactctactgcgcaaggaaatccagttcctttactttatggactggacaggcgagaggtaggtggggcaatcatttccgcaggtatttatacagaagatcagcaataacataaacgaatttcagaatagccactatgtggctttttttatgggtgaaatatggaattaattcatggtgcaaaaggtggtggcggtggcggacatacgcccacggaatcaccagatagcttactttctgaatcaacagctaagattttattggctatctcagaaggtgaaattgctggtggcttagacgatactcgtatttttcttgatgatacaccgattggcaatgcggacggtactaagaattttgagggtgtcacttgggaatttagaccgggtagtgaacaccaagaatacattcagggtatcccatcagtagatagcgaaacatcggtagggttggaattaaaagacgatcagccctatgtgcggagcattaataacactcagctatctgctgtgcgcattagactatctgttcctcaattgtttcaacaacacgataacggggatactacaggctatagaattgaatatgctattgacttatctacagatggtgctggatataatgaagtattaaagtctgcttttgatggtaaaacgaccagcgaataccagcgaacacaccgcattgacttacccaaggcaaatacaggttggcagatccgtgtccgacgattaactaagaatcagaatacagccagaattgttgataaggttactatctctgctgttactgatgttatcgatgctaaattgcgttatccaaatacggccctattgtttattactttcaatgcgcgtcaatttaataatcgcatccctaaaattagcgttcgcccaaaaggtggcttgcttatcaaagtgcccacgaattatgacccgattaatcgggcctattcaggcgtatgggatggcacctttaaacttgcagcaaccaataacccggcatgggtattttatgatttagtactcaataatcgctacggctgtggtgaccggatccagtcttctcaggttgaaaagtgggacctgtataagattgcgcaatattgtgatgaattggtacccgatgggcatggtggtgatggtaaggagcctcgattcctgtgtgatgtttatattcaatcgcaagaatcggcataccaagtactgagagatatagcggctatttttcgtggtatgacattttgggctgataacaaggttaatgttgtcgctgatatgccagatagtatttttagaacgtttactaatgccaatattgttggaggtaagcctacctattcaggaggtagtcagcaaaatcgatatacacaagcattagtttcctacacagacaccaataaccacagtaatgatgcgattgaggctgtggccgatattaaactacagcgtcgttacggagtacgcaaaactgaaatatcagcgataggttgcactcgacagacggaggctaaccgtagaggtcgctgggcgttactcaccaatgctaacgacagagttattagttttgcgacaggattagagggggcaataccttctcctggtcatatcattgctgttgccgattctacattggctggaagagataatggtggacgtatatcgcgtgtagaaggcagaaaaataacacttgatcgcagagccaatattaaagcaggtgataggttgattgttaatctgccaaacgggcgctcagagggaagaaccgtatcactggttgctgataatatcattacaatttcaacggagtactcacaggaaccagagaaaaacgcagtttggacagttgatgctgatgatttaacattacaactttatcgggtcgttaatattactgataatggcgataatacatacactattactggcgcaatccataacccaagcaattacgatcacattgactctggcgcaagaataggtgagcgtccaatcaccattgttccaccgagtgtgcaagcaccacctaaaaacattcgtatatcatcctattctcaggttaatcaaggtatttcatttattactctgcgtgttgattgggatgcagttgataatgccattacctatgaggctcaatggcggagagataataataactgggtatcaatgccaagaacatcaacatgtgggtttgaagttgatggcatttatgctggtcgttatcaggtgagagttcgtgcgataaatgcgtctgaaatatccagtgtatggactaatgcgccagaaacaacactgacaggaaaagtagggagcccgcctaaacctgtaaactttagagcttcaccgctcgtatttggcattaagttaggctgggaatttggtgaaaacaccagtgatacgttaaaaacggaaattcagtacagcaaaaccaataatggtgaaggtctgatgctgttatctgatgttccttatccctcaaaaacctatgaaatggcagggttatcagcaggtttaacgttttattttagagcaagactggtagataaaataggtaatcattccgaatggactgagtttattctgggagaatctgagtttgatgctagtattattcttgatgaattagcggggcaaatcagccgagaccaactcgcacaagacttattgggtgaaattaacagtaaagctaaccaaatcgatattactgaattacatgagttgatgaggataaatcatgacaagattttatctgagttgatgaggcatggagcaacgattgaagaaagtgaaaaaaaatgggaggaggcaggaaaattactggctgagcggatgaaccaagtttcaacggcaacagaagcacaggctgccgcaattaaacaagagcaacaagcacgtattgagggtgataaaaccgaagcgcaacaacggcaatccttagctactcaacttcgtggtgattatactggcaatgatttatcgaaagtgaccgcaggactcatttccgccgagaaacaagcgcgggtctcgggtgaccaagcagaagcgaaagcccgacaatcactggaaacacggatgaatgggaatgtttcagcgattaataaatcattagaaaccctcacctcgaaacagcaagcacaaacgcaagagatttcaacgctcaattcaaatcttaaggggaaagctgatagcagtgtggtgaatgcgttaaatacgcgagtaactaatctcgatggcaaagtgatgtccgcaacctctcaggtacaaacgttatccagcaaattagatacagtgaaagccgatttaacggagtctgtggtggtggatttagatttatctaaactcaatgaaaacacctattatccgattattttgccattagtaacttctcgacgttatgcctttaaggtttttagaacattagggcaatatagagacaataaaccgagctatgcgactcacagcaccaaaggctttgccatgattgtggaatggcaagtgagtggttccggatggggaacccagtctgaaaaccgcatcattgataattttgattggcgatggacaaatcaatcccctgtgatggggccagctcaattaacgaatggttctgtggaatatatctatttgcgaggaggtgctaaatatcagctcactaagcataaaagtgttaaccatcaaattatcacccgcacttataccaataacaaacaatcggtggcaccaaaaggatttgtggcgaatgaagtacctaagtccagcgaacagaaagccaatgcaacggcgaatgcggtaaaccaacttgaaactaaggtgactgaggtctcaggtaaagtgacctctaccgcccagcaagtcactcgccttgaaagccaagtgggtacaagttcagccaaaattgaacaaacgtcgaaagtggtcaccgacataaatggcaaaatttccgcatcatggacaatgaaagttcagcaagatagcaaagggaataaagtcattacgggcattggcttagggtttaatgcacaaggaaatagccaatttctggtcaatgcccaaaactttgcggtgatatcgtcattaaacggcaaagtggtgacaccgtttatcgtgaagaatggacaggtagttgttaatgaagcttttattggtgatgcaactattaccagtgcaaaaatagctaatgtattgcaatcaaccaatttcagccatgcaaacaaggtgggctatcaacttaatatgcgcactggtgaagaaattaaatatgggaataacgctcaggggtactggattgaaacaaacatattaaaacgtttgtttgataaaaaaggcacaatgcgtatcagaatggggatatggtaatgggcatgggtttagaaatatatgatgagaaagggcgactcattattggagaagacactattataccgcgccacttggggcaatttgaccttcctttgtcccaatatggatctcttactattcctgagatttccttaggaggtgaggttgtttgccatttctggctacggtatcgctctcgatggagtggtgagtttcatgtagataagcctaatgagagaacagaatactccatatctggaaatacgttaaactaccgcgttgattacaatatctatcgctgggagaacaatggctctggtggcgggcagacacaagcgaatgactcattctcaagtcatgttgtcgtatgggtggtgtgaaatggttggtgtagaaatttacacaaataataggctgatacaattaaccgataaactcgaaacaatatgtgttttgagaaaagcaactcctgatgaactaacgtcatcatcaggccctcatgatagctatccgagaatctatgcgttaaatagccaatggatggttgctccgatttccaaggtaagcatacctcaacacggagttggtcttgaagtttatgatgagcaagggaaaatgaaattttcatctcttgctaagttggtctgctttgagaaatattatgatgtcaatacggggagcgctggcaaaggctcattaagaatcgcaggcaaaagtggtcatcggtatggcatgattaagactcgctctatggggtattttcataatacaaacatacgaagctacatagaccctgacacgtgggatgaagtttggacattcaaaagatatagcgagcgttatgtcttgattgatgatgtgggagggttaacatttgagtatcgatacgagttcttaggagaagaggatggctggataagtatgcctccgagtcgagaaggttctggattaatggaacaagggcttatgatagacgtttcaatgttagaagattaaataccgcactaatgtggtttttttgtatctaaattttaggaaataaatcatgatatacacaacaggcactgttagcacagtgtcagggtctgctattgtctctggcacaggtaccattattttaattaaaaatggtaatgctaattttatttatatggtggacagggttaatagcgatacagaattagtcatttcacaaccggctacatttaccgtaaaaaacactagttacagcattaatctcactgagccgaactcatacagcgacgctaataatcgtatgaccgctattgcatcagatattacgtagttcttaaacgagcaacgagttacgctcgatggtgttaaaaaagtgctgggggatattagtaaaaagttagataaaagtggtgtggacctttcagggatttcgaagtgcgattacacgtaatacacaaatggcttattgtgtgtttcgacaaaaatccaccttaaaggcgggcgctattggtctttgccgacaatattatcgcatttagataagtgtgttgtgttttatcataccaccaaccctcaagcggaagtgagctatttagcgcataaaaagcaattatacagttcagcccaaacagacatttatgtgtgtgtattcgtttcaggaatggttttgaccccgaagaaacgttgggggttatcactgtacagtgaagatggagcacgggtctttaatacggactatctgccttttacccgaggacaatcaatggcattgttattacggaaggggagtgtagagactccatatagcttgcctttagtctgtgcaaccagtcagtttgtgaatgcatcttatcaggatgaccacattgattgggccaagcgcaatacggggatacggggattcgttttcggggaaaacagatttttgtgagcgaacgaatacgtgatgctcatcggcaacatcatgtagagcaacgtattcccttttatgtccttaatggttcacattatttttaataaaatgaatacctgtctatatttatgtgggatacatgtcgcttttctttattggcataatgctttctgctgataatgattgttttgctttaatcatttctttttcatttgaaaatttataattaggcaatagttctttaggtttgacacctaaaataaacgcgatagagaataaatgttctactgttattttggtatgtccattctctatacgtgaatagtgctgttgacttatttccaatgaatgggctatttccctccctgtcatccctaattcttttcttttttgcattattctataagcaataatggaattaattgtactcatgaacttcattctccaacaataaacagatttttaagtttaacagagtaaaaagcatttgttataaaagcattttactctacttataaaactcaattaatttttattgatatgaaaaagtaatcgttgctactgcttttacacttcctggcgtaatagtattttctgtttttatataattagcttttaattttatacgtggatttatctctcctctataatttgaaaaatgccattgattttgatttcctttgttaggagtgtctgaaccataactaatcgcagttacttcattatttttatataatcttagcccaacgccttttgccgtagaatccgttgctaatgttaatatatcagaacgattcccatgttgggtcgcatcatttaatgtagcataaacatcaataccgtcttggcattgaagttgtatattaacttcccctccttgcacttctttatacaaagacgtgaactgggattgatagacagtatttaatggaacaacataattcttttgattcatcgagcatgtttggctttgcacttggatgcgccctccatttaacataacaggagctgttaatcttttattattcaaacttgcccgattagattccaataaaatatggcccagttgtttggttggtatcgttacatacccattaggtaatcgtcctgttgcgacaaaagcaacatataaacgagcaccaaaacttccagttgcaccattataagcatttggatttgtattggcggcaacaggatcaatatatatacttgagctgtttatgggaaccaatggcgttgcaggccaatagcccgccataccaataataatacctagccctggaactccagtatcaaatatatcgaaatcggaagattgagtgttatttccttggcgaaagttatatgtgattttgcctattttaggtaatgtaggagtaaattttccacgcattaatgctattaaactaccgccgttaaatatatattgattacttgttccggtgagttcccctatcactcgtgggtaagtatgggcatcagcaggaccaataacaacaacagggagggtagatgtgttgattgttattggagacggtacgtagtcatttgcaccagcaacagctagactagggaatagagttaaaagaaataatatgacaaagattcttttcatggtttgttcctaattagagtgcggtatacactgaacaggaatggtttgaggtcgcatgtcagtttcattgcgtgtcgcatgatatgtaaatgagcatttatcgtcatgatttggtccccatatcacatcaagttgaccttgtttaggaagaccgcgggtaaataagcgtccagcttgagccacatatccgactaactgcttatgctcatccaaaacctcggaagccattggaggagtactaccatctggcattcgaatatcaaatagtaggcttctccctgtttgagtattaaatgtcactaacgtggcactattagcgcgaggaatgatttcttgttctgttgctgataactcaacattcaaatccaaattagtggggtcgatgctaatttgatttttttcataaggcgtgacataaggcacaataccatttccccaaaaatctaatcggctacctggtgcattattaatgaccgcaccttgtgctccttttgcatggataatggtaaaagtatcacttaaatcattacttaacgtcactccataaggatgtacgacaacggcccccgacgcacccaatgacatttgacgattatgttgagtatcttgcccgacggttgcggttacatttacataaggtgaacgatagcctccattcatcgcatagccggaaggtccactttcctgactattacctgaaataccataagagaattgattatcttccccagcgataccgctgatggatgtttgaatgctgtttttctcgcctttattataatttaagacagtagaaaaaatggggctttgaacacgctctcccaaaggaagcgtaaagttcacataaaatctgtcatctcggtgttgttgctcattatctcgtgattgagaaaagccaatctgataaccaagttttttccaaaaatggctatatcccatctgatactcattacgacttcctttatgctcccagtaattataagtggtaccagttaaaaatatatttccccatttttcacctaattcttgattaattgaaacttggaattgatttttagggcgataaaatgcggcactttttatggaaacatcatcaataaattcactgtgattagccaatagcgcatctttcaaatggtaaaaatctttagatgaataacgataggctgctaacgtgatatttgtactcgtggtcggaatattgacgctatagctagtatgtaaactgtagcctttacgcgttacgttagagtgattaaatgttgttctggacaatgtaatgtcagatgcaattgccccaatcggcgtgttaaaagcaacaccagccaatcctgcggtatattttgagcttgtggtcagtccactatttaaagtgatatcatttgtcaaaccatattgatatgtgccttgtgcaattaaatcatgatatgtctcatttgcataacgatagcgtcccactgacatttgccaacggctaaatccgggacgaataagttgggcaacagaagcaaaaggaaccgtaaatgttcttgtttgtccattagattcggttatttgcacaagaaggtcgccagcatatccactgggatacaaatcattaatgacaaaggggccagcaggcacagttgtttcataaaggatgtgagcattttgataaatcgtaactttagcattactattagcaatgcctcgcacgatcggagcgtagccacgtaaagagttgggtaacattcgttcatccgatgctaatcgaattccccgtaagctaaggctatccattaactcgccattcgtataaaaatcacctaatgtgaattgtgcccgtaaccgagcaatatcatgcgtcacatttgtttcgatattctgatatccggtagaatgaccattattccagctttcaccaccacggtgacgaaaagcccatccccataaattgagtcccgcttttaacccaaggtaagtctgctcattatttatatccggagtattgtattgataatagttaacatcatagttgacaaatgcggcagggactccactttgccactgtgcaggggcaatatatcctcgaggtcgagtattcacttgtgcctgaggaatttctatattcagctttaaagtggataaatcaaaatgaaattttgctgaggggagtccttctgaggcgggataacaagtggctttataactgttttcaggaacagtgcctttgacgacatcaattaatgaaagtaattccggcgttagacataacgtcgacgtattcgcattgtcagtatataaatactgtacattagcttttcctttccattcattattgagatagatatcagcgtaatacttgccctcaggaatagggttgccataattaaagcgacgtatatcaatcgcattctttccttgcactgaatgcaaaaagctaggatcaaattcagcttcttcagcagcgaatgaagaaattgttatcaccccaatccccaaagcaacacaaaacggaagagaataacgataagaaatgaggtgtaaccgattattaaaattcattatattaccttattccaaagtagattcaccttgttggtatccaccataatcattaacaacaacccaagtgactttatttgttaatgttggcttctctttaagtgaaaatatttttgaagaaaaaggagctatcatcccactttgttcaacaggcgttagctgtttatcctgacccactgagattttgttgtaagtgatgtaataaggtgttgggttaatcgctttaatgcgtagtgctccttcctgatgccaagtcactttttggtaagcatcatcaggcgttacgttgagattatcagggcgaaagaaaaacttaatgcgactacgaacggctaattgtaagtaattgttatttccctctgagttttctgaattttcttccactttaggttttgctggaatgtctaagacatttagatagaaaagagactctctatcttgtggtaatgattcaccggtatagacaatccggatggtttgccctgatttcggctccatacgaaatatgggaggagtaatgataaaaggaacgtgaattgaatctggtgctgcagctgcgtttccggtatctaaccaagactgaattaatgcgggggattcatcgttattatttaattgaacattaatgcttttttgcgttgcgggataaacaacgcgggtccccataataaccacactggcttgagccactgtggatacaaacagagtcaagaaaataagaatgaactttaacataatacctctagaaggaaatggggcagttttttctgccccgtaaaataaaagcaatccaataaaccttactcataggcaatggtgtaatgaacggttgcttttacatccccagcggtagatgatccggttgcataatattgagcaaaatatggaaggtttacatcagcattgtcgatttgtacttcctgaacattttgtgagttaacatcagtacctaactgaattgttgttgctgcatctgagttaagtaattgaacttgaacattattcgctttagttcctgttgctgtattttttaaattatgtgtagttaaatcagtatcagcggatggttcaaaatatactttaacgtttttagcaccatctttatctgtggaacaaccagttaacttaattgtaaatggagttaagcctgctgttgttgctacattatttaatgttgcgactgaaacagtcggcaaaataacagctaaattttttgattgggtatcaacagaacatgtttgatcaacaactttacctgtaaatgtaattgttccgtcatacgccatagatgagccagcaaatgcagcagaaagaatagtagctagtgctataacttttcttttcatatatttatgattcctattttaaattaaagttaagttattttttgtttttcaaaaaaatgaaaagtattattgaataataaaatatatataatcctattaaatagagtttatagtgaggtttatatttgtagattatataaataataaagatattaagttttttaatggtgatgtagcaaatataaaaataaataattgaaattattatttcaaatatcacttaagtaaagatggttttttcgatcgatggcgttgattttgatagttacgacctattaatggttggtgaaatgatcgttaaaatcgatcttgttattgttgttcaatgtgttatatcaatgattgatgatatatatatgagaaggttattagtcaaaacttgagttttaatataaatcaaattgcttagctctttcagatatggtgcagaattcccatgtagcaacttcttatttttttcactataaaacactaaccctttattaaaatacattcataaatgtgctggttgttgtcgttcaacttcggacgcaacaattggcatgttgagccgttctttatatgcgacacctgaagcagccaaatcgacattgattttgtctttttcttcttgagataagtttgcgaggttcataacggatccggttagtttttggagagtatagcagggtgggagaatttaacagaaaacacactcactaaaacttgtaatatattgatttatttgtctggtattgtcatgttttgtcgtgttttttcttattaattatatcatggttaaattgtaaataattgattttaaaacaatagcttgatttaagtctgcttattggattatagtaggtcaatatgcgttttgctttgaggaaaaaatgaccatgaatgaggcagatgcccgcccaacgaactttattcgtcaaattattgacgaagatctggctaccgggaaacataatagtgtccatacccgtttccctcctgaacctaatggctatcttcatattggccatgcaaaatcaatttgcttaaattttggtattgcacaagattatcaaggtaaatgtaatttacgttttgatgatacgaatccagtaaaagaagatgttgaatatatcaactcgattcaaaaagacgttcagtggttaggtttccaatgggatggtaacgttcattactcctctgactattttgatcaactgtatcaatatgcgattgagctgattaacaaaggcttggcttatgttgatgagttgagtgctgaagaaattcgtgaatatcgtggcacactcaaagagccaggaaaaaatagcccttatcgctctcgtagtgtagaagaaaacttagcgctatttgaaaaaatgcgtgcgggtggctttgaagaggggaaagcgtgcctacgtgcgaaaattgacatggcatcaccatttattgtcatgcgtgatcctgttctttaccggatcaaattcgctgaacaccatcaaacaggtaacaaatggtgcatttatccaatgtatgattttacccattgtatttctgatgcattggaaaatatcacacattctttatgtactttggaattccaagataaccgtcgtttatatgattgggtgttggataatatcactattccttgccaccctcgtcaatatgagttctcacgtcttaatcttgaatataccgtcatgtctaagcgcaagctaaatcagcttgtgacagaaaatattgttgatggttgggatgatccgcgtatgccgacaatttctggcttacgtcgtcgtggttatacggctgagtcaatccgcgaattctgtcaacgtattggtgtgaccaaacaagataacaacgtggaaatggcatcattagaagcttgtattcgtgatgatttaaacgaaaacgcacctcgtgcaatggctgttatcgatccggtacgtttagtgattgaaaatatgccagaaggtgaagagattttaactgcgccaaatcacccaaataaaccagaaatgggaactcgtgaagtaccatttagccgtgaaatttatattgatcgtgcagactttaaagaagaagccaatcgtcaatataaacgtctggtattaggtaaagaagtccgtctgcgtaatgcttatgtcattaaagcagaacgagttgaaaaagatgaacaaggtgaaataaccaccatttattgtacttacgatccacagacgttaaataaagatccggctgatggtcgtaaagtaaaaggggtgatccactgggtcagcattccacatgctattccagcagaaattcgtctttatgatcgtttatttagcgtacctaatcctggtgctgaagaggatttcttatcaaccattaaccctgaatcattagtgatccgtcaaggttttgtggaagcaagcttaaaagatgcggctattgaaaaagcgtatcaatttgagcgtgaaggttacttctgtgctgataagctttcgacagcggataaactggtctttaaccgtactgttggtttacgtgatacttgggcgaagatttcgaaacaaggttaatacgctctgttttagtggcgtgtaatatcactaaactcacatcttaataaaatgctcgataataatttatcgagcattttttatttatcaaataagtttgtttttattgaccaataattattattttttatttttttaatgtgagtttctatagctattatttgtatcaattcttatttacgttgtgttaaattattaacttttgtcatcatcttcttcttttatttcatatgattatattgaatttgtctataataataaaaatgtgaaccatgacacatatttttcttttctaaaaaagtttattaattaatgcgactaataattcttttctataaaaacgaaacattatcatattaggtgtgataattttcttttttaatatcaatatattaaaaaatatttacgttctacttgtccctcattgactaaagaaaaaatatgaaactgtaattaagtaatgtgcccttggtcatattttgataaaaattcttttttttaggttgataattcgcgtcgcgaaaaataagctgttgttaacctaattttaggttttttccccatttggggttttatatttggaaataggcgttggtgcttatttcttttttagtcaaagtcaaagaggaaacaatgctatggttatgcaacatgctaaaccaggcagggtggcacttgccgttatgggcgcattgcttgtaactgcactacctgcgaaaatgtcttatgctgaaggatttattgatgactcaaccctgacaggggggatctattactggcaacgtgaccgtgatagaaaagagttaacaccaaacagtcctgattacggcaaatataaagcaaatttacaccactctacctttaacgctaatcttgatttttcttctggttatctgggtgatttttttggtattgatttagctgcttttggtgctgttgaacttaacaacagtgggccagctgcacctaatgaaataggatttagtgatgcaaaaagtcgctgggatgaaaaatggacaggtgatcgcagtggcgtgagtatttataaagctgctgctaaatttaaattaggccatttctgggctcaaggtggatatattcaacctaaagggcaaacattattacgtcctcattggagtttcttacctggtacttatcgcggtgcagaagcgggcgctgtatttgatttcgataaaaatggtgaactctctttctcatatatgtggactgatgaatataaagcgccgtggtatcggaatatgtacaatttccgtaaggcagacttagagacaaatatcagttatttacactcttttggtgccaaatatgattttaaaaatagcttagtattagaagccgcatttggccaagctgatggttatattgatcaatattttggcaaagtttcttacgatttccctatcgcaaataatacattaaaaacctcttatcaattctacggtgcaaaagataaagtcaccggagggggaattaacgatgtttatgatggtttggcatggttacaagcattcactttaggctatacctacaatgtatttgattttaaagttgaaggtacttgggttaaagcagaaggtaaccaaggttactttttacaacgtatgacgccgggatgggcaacctcgaatggtcgtttagatatctggtgggatggtcgttctgattttaacgccaatggtgaaaaagcattatacgcgggagtgatgtatgatctaaaaaattgggatctaccgggctgggcgattggtacttcctatgtgtatgcttgggatgcaaaaccgagtagtaaccctatttatgaccaaagtaaacgtattagagaaagcgcatggaatgccgacatcatgtataccgttcaagaggggagagcgaaaggtacgttatttaaactccactacactcgttatgataaccattccgatataccaagctatgaaggtggttttggtaatatcttccaagatgaaaaagacgttaaattcaatgtgatcatgccatttacgattttctaaataacaataaggataaagtgtatttattacgctttatccttaataaaaaatctaattaacattatgataaaaaagaaaaaacaataaaaaatatgataaataaaaaagagtaatgtattcatgttttttaatatccttttttttagtctttttcattcttgtgcattttttcattttatggcagatttcttgcaacttattttacctttctttatttatatttattaatctgcatttaatacaattgaataatacaggttttcaggaagaagcatgttaaaacgattggatgatttcttattagagccaccattaaagcctttcagaggtataaatcgatttattgttgagtttctttttttcggtgtaaaagaggcacgttcttgcttattcgctggttttttcttctttattttatttgcgacgcctagtaaaggagtgctaggtataccgcgttatgatgttttgcttattctcgctattgttttccaattatggatggtatggggaaaacttgaaacatgggatgaattaaaagcaatttgtttttttcatgttgtaggttttgtcatggagctatttaaaacatcagcagcgattggctcatggaaatatcctgattttgcttacacaaaattgtgggaagtgcctttatttacagggtttatgtattctgctgtcgggagttatttaattcaagcatggcgttttttaaaagttcgaatagaacattatcctccttattggatggcaactttggttgctctcgctatttatattaatttcttttctcatcattttattggtgattatcgttggtatttaacggcatttattttaggtctttatgcccgtagtgtggtctattttacgccttatgatacagagagacggatgcctctgttactggcttttgttctgataggtttttttatttggcttgctgagaatttcggtacgttctttggtgtatggcaatatccaaatcaaattggtgcgtggtctgttgtgcatgctgggaagtggggatcttggtcactattggtcattgttacatttactatcgtagtacacctaaaacatattaagcatagtattagtgtggttaagtagcgttaccaataaaaaaggaactgcgggcagttcctttttttactgagatattatccagaatgattacttctcatcatgtgcgtggctatcttctttacaattacctgcggcgcagtgaccatataaatacaggctatgattggaaagtttgatgccatggcgttcagcgatatttctttgacgaacttcgatagcatcgtcagtaaactcgataactttaccacaatcaaggcaaattaagtgatcatggtgatgttgttgagttaattcaaatactgatttaccaccttcaaaattatgtcgggtaacaataccagcatcatcaaattggtttaagacgcgatagactgttgccagaccaatctcttcgccgatatcgatcagttttttatagagatcttcagcactgacatgatggcactcaggatcctggagcacttccaagatctttaagcgaggaagtgtaacttttaacccagcattttttaacgctttattattgtcggtcatgcggatttaatcctgttgctaatggtgaatttaatatgtgctcacaaaatactgtatatattcattaatacatagggtatttaataaccttaatgattataggcatgatattaaaaaataaacaccccacctatcacactatcttagcacaccattgaataattatcattctcaatattaagaatttatattatcccagaatttcgtcaaggctcatctcttctttgatctgagcaacccaagcgtcaacacgctcttcagttaattctggttggcgatcttcatcaatcgcaaggccgataaagtgattatcatcagcaagacctttagatgcttcaaaatgataaccttcagtaggccaatgacccacaatgactgcgccacgaggttcaatgatatcacgaatagttcccattgcgtcacagaagtattctgcatagtcttcttggtcaccacaaccaaatagagcaacaagtttaccgttgaaatcaatatcttctaatgttgggaaaaagtcatcccaatcgcattgtgcttcaccataataccaggtaggaatacctagtaatagaatatcaaatgcttcgatgtcttcttgactggattttgcgatatcatgaacttcggcattatccgcgcctaatctttcttgaagcattttggcaatattttcagtgttgccggtatcactgccgaagaatattcctatgattgccataaagtgagataacctcttttattctctttgtctgtatttttgaacaattaccagtaaaagataaacatcatgttttcatcattgaaaactaaagcactattttgacgaaaagagcagggtaattctgtcgaatttgtgtgattttcctgctgatttttttagctttgatgtttttttaacgcataagtttgtgcgagttgttctagtaatatttcttcaataagctcactacgactgacattttttgcgctcgcaagctcattaagcgcattgacagcatcctcatttaatttcaactcaacccgacgtaatccattgacgcgatcgcgtcgtaattggtttcgtttattaattctaagctgttcatcccgagaaagcgggtttgttttaggtcgcccaggtctgcgttcatttgcgaacaaatccagtgtggtgcgatcagtttgttcttttgccataaattttgctgtgaaagggcgtataccaatgactcaatatgaagcgcccaataataccccacatatcggcgtatcgctactgcttcctgtgtttaacctattgtcatttggtctttttatcaacaatgacagatttaagagcaataattgtacgctataaaatagtattgctggtgatttataaccaacaaaggaacattatactgttttggctaagaagcgacgaatggccttaattactgtttctggtttttcagaatgcacccaatgtcctgtattggcgacaacaaaggcggttgcttgtggaaattggcgagcaatattattgcgatattcatctaaaatatatggggatagtccaccacgtataaacaaaacaggatgatgccaagcaggcacttcttgccaaccaataatatcggggtaagcctgtttgattgcgggtaaattaaataaccattcaccttttttaaatgatttaagcagaaattggataacgccgtcttcttcaataaaagggcgcataatagcaatagcttctgtacgttgtgtgacgtgagctttagtgacagcttcaagggctgcaaaaattttatcatgacgacgaacattataagcaacaggagacatatcaataaccacgatacgttcaaggcgaagaggtgcgagagcggtcattgccattgcaattttccctcccattgagtgacctataacgattgcttttgcgatatttaagctatcaagcagggttaatacatcttgtgccatatcgtgatagtgcatactttcactatgaggagaatgcccatggttgcgcacatcaatttgtatcacggtgtggtcttgacgtagatcgcgacctagtacgcctagattattgagatcaccaaaaagcccatggatcaacacaataggtaaattgtttatcgttgctgtttctggttgatgtatttgatagtttaataatgcattgagtttcatattgatgaccaaaattaagtctattttttccttatgatgacatgtgcaatcatattagccaacttgttgtctttttcggaatatgaaataaagttaagctaacaagagatagtttaatttattatgttctgagaaaatagaataatatagattattattccaaacttaacgggaaagataaaattttgatatagctcaataaggataagtcagagttttatattattttaattgctgatgtgaaagggcattgaagaagatgtcaactctattctatggcaataaattcaaagaatagaagatgatacagatagaaacaataggataaatacccagcttaaagtttaaaaagattaattctttaatgaatacgctttaagttattgaaattttacctattttgtttttaaagattatatcttataatcctagtcacttttttttgaaaatagtactgggtagcaatgaaaaagatagaaattgatgacgaactttaccgctatatcgctagcgaaactagacatatcggtgaaagcgcttcagatattttaaggcgtctattgaagcttgatgccaaacagcccgtacagccagtcgttgtcactgagtcagtacaagcgcctgtcgttaaacaggatgctgatcttaagcctgtcgcaccagcaaaaaatccggtccgtgaaatgcgtgaactgctgttatctgatagttatgcagagaaaacaaaatcagttgatcgttttttacagatcctgtctacattatatagcttagatagtgctacttttactcaatctgctgaaacagtacatggacgcacgcgaatttattttgccggtgatgaaaaaacattgctcgacagtggacgtcatacaaaacctcgccatattcccggtacgccattttgggttattaccaactcaaatactgagcgtaaaagaactatggtacaaagcatcatgcaggatatgcaattccctgccaatgagattgataaagtgtgtggaactatctaaacactattgttaattgatgcattgcaaaggctttcgtttaaagcatgattgtgatgtaaaataggagaagatttgtggcaatccattcaagagctgggcaacatactcgtcaaagcgatctgattaatgtagcgcaattaaccgcacaatattattcactaaaaccgcaagcaaatcagaatgctcatcgtgtgaaatttggtacatcgggtcaccgaggcagtgccaaacgtcatagctttaatgaagcacatattctagcaattgctcaagctattgctgaagtccgagctaataatggtgtaacggggccttgctatgtaggtaaagatacccatgcattatctgagcctgcttttatttcggttttagaagtgcttgctgcaaataaagttaacgtgattattcaagagaataatggttataccccaacgcctagcgtttccttctctattttaacttacaatcaagggcaccaagacattgctgatggtatcgtcattacaccatcacataatcctcctgaagatggggggataaaatacaatccatcaaatggtgggcctgctgatactgatttaacctctgtgattgaaaaacgcgccaatgaattattgaaaaataatttatcgggggttaaacgtctttcttatgatgatgcattagcgagtggttatattcacgagcaagatttaattatgccttatgttaaagcgttaggtgacgttgttgatatgaaggcaattaaaaaagcgggtttgaaattaggtgtcgatccactgggtggttcaggaattgaatactggaaacgcataggtgaatattacgaacttgatcttgagttggtaaacgatcaggtggatcaaactttccgctttatgacattagatcatgatggtgtgatccgtatggattgctcatcaccttgggcaatggaaggtttattgcaactgcgtgataaatttgacttagctttcgccaatgaccctgattacgatcgccatggtattgtcacaccttcgggcttgatgaatcctaaccactatttagcggcagcgattaattatctttttcgccatcgtcctcagtggtcaaatgaggtaaaagtgggtaaaacactcgtctctagcgcgatgattgaccgagtcgtggctgatttaggtcgtgaacttgttgaagtacctgtcggctttaaatggtttgtgcaaggtctattcagtggcgagtttgggtttggtggtgaagagagtgcgggggcatcattcttacgttttaatggtaaaccgtggtcaacagataaagatggtattatcttatgtttactggctgctgaaataaaagcagtaacaggtaaagatccacaacaacattataacgagttagcgcaacgttttggctctccaagctataatcgtatacaagcatctgcaactcatgagcaaaaagcgttattgtcacgattatcaccagaaatggtcaccgcaaataccttagcaggtgatcctattactgcgcgtttaactcacgcatctggaaatggtgctgctattggtggtttaaaagtgatgaccgattatggttggtttgctgctcgtccttctgggacagaagaagcgtacaaaatttattgtgaaagcttccgtggctctgagcatcgcgaattaattgaaaaagaagccattgaaattgttaataatgtttttgccagtaaacaataaactaaataacttagtcgtataatttatttattaccaaatagaatacactctacctataggtggagtgtatttttttaatcataataacttttagatcacaacattgatatccatcattgatgattgatttagaattgaataaagagcggataatcaatgcaaaataattatgtgttacgcagtgtgcgttatatgttagatcttagcgatggtcatattgttgatataatgaaactggcggatttcacagcgactaaagagcaagtcaatcagtggttaaaaaaagacgatgatcctgcctttgttgagtgtgatgatatggccttgggacattttttaaatgggcttatcttttatcgtcgtggtaaagatgaaaaatatcctactccagaagtcgaaaaacggataaccaacaatattattttaaagaaattacgtgttgcctttgaattaaaagacatggatatgattaacatttatgaactagcggattttcgcgtttctaagcctgaacttagcgcgatatttcgtaagccaggacataaaaactaccgtaactgtggcgatcaactggtgagatactttctgaaagggttaactgaaaccttacgtggcaaaggcaaagcggtgaagaaataaaattagagtattttatgctataaaattatctagttactgaatgataccccaaaattgattttctgatttggggtatttttttatggtattaactggcaaatgaataaatttattgctaatgtagtattactaagtaatacaatgtaggaaggggttatggcacgagtaacgagtgtaactttaggtgaacacttcaatgattttgtgggctcaatgattaattcagggcgttatggaaatacctctgaggttattagagatgctttgcgtatgatggaaatcagagaagaacgactccaattggttcgtaaaatggtactagatggtgtgaattcactagaaagtaaaaatgacatggatgatatttttgcaagagctgaaaaggacttaaatgtataaactttctaaattagcagaagaagatatttaccaaattgctcgttatactattcaacaatttggagtaactcaggcaaaaaaatatcataatgatttaaaacagacatttgagctactagctaaagcaccttggattggacgagaatgtaattgggtgtgtaatggtatgagacgatttgagtttaaaaaacattcaatttattatctaccaaaaaatgataccttatttattactcgtcttattcatcattcaatagatgttgattttgttgattttcctaaataaatatttcattacttattaccaaatatattgtccagtcatatatcctttagtgctgatatagcattattggataccttatctcccttttcttgttttgattttctcttttttatcattcactcgcgaaattatttactataaccgtaattcaataaagtattagtttgctttgttaacggattttcgcgtttctaagcctgagcttagcgcgatatttcgtaagctaggacataaaaactaccgtaactgtggcgatcaactggtgagatactttttgaaagggttaactgaaaccttacgtggcaaaggcgaagtggtgaagaaataaatatgtcttaattcaaattattccctcttaatataaatagaagaattttttcaagaaaattctttatagtatgcgaactcgtatttaatcttgaatttaggtggtgtacattgtacacttttaaatgatggattagaaagggaacttaatgagtcatgctatagaatttattgaaacctcaatatttactcagcaaatcaaactattggctacagataaagaaataagaatacttcaaaatgaacttatcagtaaacctgataaaggcgacttaattaaaggaacaggtggattacgcaaaataagaatggctgtaggtaacaaaggtaaaagtggggggactagagttatttattttttagcgactaaggaagttatctatttagttatggcgtatccaaaagcaataaaaattagtttaactgattcagaaaagattgagttaaaaaaactaacaaaaaaacttaaaggtgaacggtgatatgagtttcttcaatgatctaaaagcctctttagaagaagccgtagaaattaaaaatggcgataaaaaagcatcgaaagtgactcggtttgaagttgctgatgtaaaagcgattagggagcaacttaacgtttcacaaagtgaatttgcacatgcattagggacaagtatcgatactgtaaaaagttgggaattaaaaagacgtaatccgacagggcttacagcgaaagtacttattgctattcataaaaaccctaatttatttaaagagttagccaatatctaatttcttgtttactgctaaacttattttgtttagcagtaaatctcactctctgattttctcttttttatcattcactcgcactcgcgaaattatttactataaccgtaattcaataaagtattagtttgctttgttaatgtttttttgtttttgtttttgtttttgtttttgtttttgtttcaattttgtttcatttttatttctattgtgaaatttaattacactacaagcaaaataaaggtgatttttcgcacaaaataagtggtctgatcagtagtaaaatttcatcaaatgaggtaaaatttcagcatcaattcattttatgcaggagaacactatgccagcttataacgaatacactaaaaaacatgttttagcccgtcgtactggtgcggtagcgctaggtattgtggcatttcctgttatggtttttcatcctaaacgcgctcagttttatagctatttacatcgtgtatggtctaaaacaagcaataagccagtttggttggctaaatcagaaatggcattaactagccataaataacagaaaattccatttaacgcctgttgaaacaggcgttattttttccccttcttcaaaccctttttaacgtgttatcacgtgtatttttcactgttctatttattctcttattttaagttacaataaaggttattcactttgagaagtgctaattaatctattgttatttattacatatgtacactacgcactgtggcgccgtgataacaaggagaaacaggatatgaaaaatactgatctagaattaattattaatgaaaagctaagtattgagaattttcacgactacgcacctaatggtcttcaagtagaagggcgccctcatattcaaaaaatagtgacaggagtaacggcttgccaagctttacttgatgaagcggtacgtttaaatgcagatgctgtattagttcaccatggttatttttggaagaatgagccagttgttatccgttcaatgaaacgcaatcgcttaaaaaccctactatgtaatgatctcaatctatatggttatcacttacctttagatgcccatcctattttaggtaacaacgctcaattagcgttaaaaatgggcgtaaaagttgagggtgagatcgagcctttagtgccgaaagggatttttgatctacctgtcacagccaatgaattaaaaacacgactcgaaaaagccttacagcgtaatgtgcttcactgtggtgacaatgcaccagatgttattcgccatattgcttggtgtactggtggaggacaaggatttattcaacaggcggcagagcaaggtgttgatgcatttgtaacaggagaagtctcagagcagacgattcatatagcaagagaaatgggcgtgcattttttcgctgctgggcatcatgctaccgagcgttatggtattaaagcattaggtgaatggttagcacaaactcaccatttagatgttacttttgtcgatatcgataatcctgcctaaacccagttattgctattctataagctatctctcttattaactaagtgagatagctttttatttaacaacaaccttgaaatttattcattaagttgaatgggtaacgggctttgtaattgttgcagattatcacatagccaaattaactgtaataaagcttgagagtcacgagcagttaaagcgagataacgagttaattggttagctattaatgtcatacctaaatcgtcagcaatttgtttgcttctctctaattgctctttttgcattgcagaaagttgttctcgccctgtacatgcttgggcttccaatacggataaaatggggcgacaaaatttttgtgcaagggtaggttcgctgtgatgcattgccgtttgtcgcttacgtttagccatatattcttgaatatgactaataaaaccagactgttttttcttacgtggaaattggtcaaaatcgagataaaacatttcaatgccttgctctgttttgatccaaatggtggtgggtaataaatcgatattgaaatcacgtcgaacaggttgcacggtgatcgcaacgatttctaattctcgtttagtgagaaaacgtaattcttctaaattattttgcgtttcgccttcccaataaaggcgcaaaaaggccgaatttccattattatctaccacttcccaaataacacactgctctacttcatgccaaattaagggattatagcttttgatatgtaaaaccagaggggaaagaaatccttctggttgatccgtaaaataattgggtaaatcttgccagttatgaatacctaattctgtttgtagttgatgataatctgtgacatcaagaaaatcggtttgattttgcgcaaagctatcgccaatagtagctagtttcccttcatcagaaatacgaggcgcttgtaataagaaaggtcggcgcatgagcttatctgcagtttgtttccataacgataaactatgccaaacactatagcgattaaatagggtatcaagttgattagggcgagcttgtgtcgcttgtaaaaattgttttgtttctttatcccagaaagtaaaagttgtgcctaatgcgccactttgtgctgtccaccaatgtgcatcaataggaataagcgcgagactggtttttttatcatcatattgacggcgaagttgccctcgtaatgtttttaattgttcaggtgtcgcataagatagctggaaaagataggctgagatatgagctaatagacgtaagacattgctttcatccatagtgaaatgtctttcagctaaccgcttgacttgagtacttaatgttcgtaaataagaggctaaacgaggtaaaccctcggcacgagcagacatattaagtaaatgtaattgcgttgcgctacttaaactaatgtgtgatagcccttgacgtaatagatcatcaataaattgttcaatagtattaataagggcaatttcttcatcattcagtgggcgttgtgaagattttaagggaattaaatcttcaggccacgtccaaggctgtgtattttgcttaaatattttcgcgacaatcgcaagatgaaaagcttttttctgagagctagaaaaaggggataacatgccatcgtaaccacttgcttgtaagaaaatgaccggttcatcaacatcagggagttggatttttagctgggttcctgtgtcttctagaactaaagttttatcttcccattgttcaattaagttaatcgcagtccgacaggcgggtttacctgcttttttgatgagtaactcgggatcaagcgtaaataaagagggtaataaaggcggtgtttcaacaggcgctataattttttctgctgatgtttcaatgggattatcagtattaatatcatcagtcgaattgttgttggcttgtaaccataaaatagcggctaaaatatgtttgcaacaacctgctgcggaacaatcacaactggcttgctgaatgcctgcttcatgtaaaacgactttttgcccatcactgctaaattgccctgtatttgcatcagtaacagagactttttcgttatcaacatcttttcttgcgcgtcttaataatccggcattagcaaagacggtaagcgcatcttcatcataatgaaaataaacggtctgccaactcattgcattacctctgctagccactgtgcgaaatgttctggggttaaagctgcaacttgcatacctctatcggcgagtttttgtgcgatagttgagtcataaaccggttgagcctcatcatctagtgctgccagtcctaataatttaacttgttggctattgagacgttgtgtgcaatctaataatcgggttaatgatcccccttcttcaaagtcactgataagcgaaataacagtacgcttagggttgttaactaagctttcgcaatattgcatggcactagcaatatccgtacctcctcccaattggactgtcattaacacttcaacgggatcgtcggctaagtgtgataaatcgacaacttgagtatcaaacacgattaaggagacattaacagcaggtaatgaagctaaaatactcgcacacacagctgcatacataatggaactagacattgatgcactttggtcaacacagagaatgacatcccatggaaaatgctgttgcattcgtgaattaaagtaaggagtttcaatcaataaacgacgattttgggtatcgtaatgttttaaattggcggcaatagtggcacgccaatcaaagttacgactatttggtactaacgagcgtctaaagcgattacgacgaccggttaatgattggcgaaagttattacgaatttgacgcaaaatatcttcaaccactttacgaataatggtttttactgcatctcgcgtttcttcgctcattcgtccgcgtaagcttaatagtgttttagctaacgctttagtcggctccatggcttttagcgtattgggatctttaagaaagctactgatttgataacgttcaatcgcttgtgattgcatacgttcaaatgtgctattgggaaaaagtttgcgagcttgatttagccagtttacggcagtaagttgcgatgcatcgagagagccatggcgaccgcgctcttgacgtaatcctcggcgctgatattcacggcgataaagaaaatcgagtgtacgttcaattttaagatcatcagcattaaacgtggcttgccctaaagcatcatcagcgtattggcctaaaatcaagcgccagcgtttggcttgttgtattttatctttaggcatatcatcatcatgcttctccatgagtatggtctcctttctctgttttcttcgcctcaaaccaagaaatcatgccttgtgtcttaatgcgctgttgcaatttttgattgagtttagtggcttcaagcatttgcttggcactaaattctgattgccatagtgataaggcttgcgtatctaaaccaatatcattagcaatatattgtgcaagctctgcattttgtttgggattaagttggctaaaggcaaaacgcagatcaggtaaaatctgaataaagcgttcttcatcccattgctgtaataagctatttaagtgattgactaacaacggcaggcgaatgactagctctggtgcagtgcgcattataccgacaaaataaccaatggcatgttcgggagcgctgcctgtactaaaggtcgcatttagcacggccgctaaggtcttttcgtcaatatacgaacctagataacgtaatgcatctaccgcaccttttaataaaggaacggtatctaattgtccatcaaggcgattaagttgctgataaaaatcacttttataatcatattgatgatccagtgatggcataaactcaatgagttcacgtaaagagagtagggcttgcagattgctttcttgttgttgctcatcaccttgagccaattgctctaagcaaaagaaggcttgagggatcacttgatgtagcctattttccaatgtcagctcatcggtaatatcaagatattgacgacctcgccataaatggatcaatttatgtccacattgtgttaatgactcaaggcgaaaatcttgctgaatatagctatctagcagtttaaatagcgtagggatacgctggtggagcccaattaatgccgcttgaattaacaaagtgaccgcactttggcttgaacggctttgtccttgttctgcaagctgtttttccattgctaacagtttatttaaggcgatagtttcaagttgagagcctttttctgataatgagatcagttcaccttcaacattgggggtccatgcatattgccattcttcaaataatagatctaactggtgaccagaaagaaaatcaggtccattgacacggtgggcaaaatggatttctaaaaatgccaataaatgtaaaaaacgacttcttaagcgatgttgggggttgcgataaacatcacattttgtagtttttgctaatgtatcatcaagtttaaagcgaaatgctttggcgcgttcataggtttcattgactaaagggggcgttgctgtacctaatggaatttgtcctaatagataacctgaaaaacaggttttgatttcgtcccataattcgttttgactgtcatctaaactgcctttaataaaggcgctttgtaacccatcaagcaaatcataacgccccataccagtgtgctctcttagtaaagcgaggcgtaaactctgctcggctgctagttttacggttaaataactgggtggattatcaaattgttgttctctgatagtctgagccactgagcttaaaaaggcgatgcccattttattgcgataaacttgcgttggctgttttgccgcctcattgttttctaatttatcatgatgttgttgcattaagctttgccaagcttgttggtaaaaagccggagatggcataccagatgcatagccattaagtgcatctaatctgtcaaagctatagcgaataagccaagcttgctctttttcgcccattttttgcattttagtaaagtgcttttgttctgagctagaaatagcgaaagagttgggttgtgaagaagctaagccttcgattagcgcaagggtgtgggctccccctgtgacgattaatattttggcattaggctcgtactgtttgatggtttttatatgagtgagcatatgtgcttcacgttgtgaagagccttcagatgcaagtacttcaggttcatagtcaaggcgtgcaagtgcacaccaaataaaaatgtcattaaacagagtttgccaatctgctaatgcctcaatactgcgtaactcaaaaagatgctcccaaacatcatcatgatcacggcaatgacattgtttagctaattgtgcaataaattggctatgggctaaataacgttctttttgtaagctacggctttgtagatcgctgtactcttcgttattgacttgagcagcccaaggtaaatcgataaaacgtgttgttgcattgatgcgtaaaccacctcgcaaagcttgccactcaggggaatattcacaaaatgggaaataggcagagtgtagcgatttttcacgctcttctaggccactatcatgatgacaatattcggcttgccccataatagcaataggagggagagtatctttatccgttaggctaggaataagcgaattaaaggtatccggaccttcaattaagatataatcaggttttacagaatcaattaatgataaaactgcataagcacaagctgggctatggtggcgtacaggggcaaaatagagatgttgttgctgtaacgacgtccatttcagtcgggcttggtcaattcttgttggtaaagatattgaaggtagcgtcaccgtgttgatcccttttttgggtgaaaaagcagagtaagttaactctgcctttaatagataaataaatagactttaatgcctcgctgtggctctttacgttttattgccaaaagtcttttgatgcatcaaagaacgctttccactctttactatttctggccctttctctggcgacgttgtccatgtaataacgaatacgcttaatatcatcaggattatcttttaatacaacgccgattaattgacgtgcaatcgcaccggcattcatcacgccatcacctaaataatgcgcttctaacgcacaagcataagcgatatttacggcttctgctgttgacataaccgcatcaggtgttttgatattgccaccatcttgggtattacctgaacgtaattcttggaatgtggtaaccagtaattccaccacatccatagggatggtgatttctgtcgctaaagcacctaactcattttcaagctgtgattggatcaaactgatttcaaaagctggatcacgaataggttttactgtttcaaaattaaaacgtcgctttaatgcggcagacatctcatgtacacctcggtcacgcaagtttgcggtaccaatcaagttaaatccgggttttgcactaatacgcgcaccgtcgcccatttcagggatcattaactgtttttcggacattaaagaaaccagcacatcttgaatttcaggaggacagcgagttatctcttcaaaacgaacaattttaccttgtaacatgccttgataaatcggtgagccgactaatgctcgttctgttgggccttctgctaatagtaacgcatagttccatgagtatttgatatgatcttctgtcgtccctgcagtaccttggatggttaatcctgaatcaccactgatagcagccgcaaaaagttctgagagcattgattttgctgtacctggctcaccaaccagcattaagccctgtttgcctaataatgtaacaattgcacgatcaactaaggcatcatcaccgaaaaacttaggtgtgatacctaaagtatcatcacctaaaataaattggcgcacagcccgaggagagcgaagccatccttggggcttcggattattagcatccgcttttgttaagcgttctaattcttcagcaaatcgaacctcggcactttccctaattgcttgttgttctttgggtgtttttttagccatattctttcctaattatccctaaattttaccaaggtgttttcttttcccattcaggatcaaatcctgcacaagcttcagcgacttttagataatccgcgtagctttctgctaataaaatcggtggtacttgctttaactcaatattattgcgatcccagtaattttgctgatccttctcaaaacttaaatcgaataaaaccgctggaatattttcttctggtacatagctaccactaaaaccgatattgacgtagtagtttaagctagagaagaatttgtaatagtgagagaacgagcctccatcttcagcagggcctcgctgatagcccattttggttaaaataccccgtaaggtgaacgtgtctgtgatccaaccttttcggtcttcaacttctgtttgtgtcagatctaaatcagggatcttatgttccatttgtgaaaataagaatttcactttgtaatctttgaagtgtgcaatccatgctttacgctcatcttcattaactagggcggcgtgagctaattgaatcaaagaatcattttgtaaggtgacttcgtcatcttcaaggttaagtaaagcaccatcatcagaagggcggaaggtattgataacttcaccttcttttacttcttgccaaactaattgttcaatcaatttatgcataatagggtgagctaaaatatactcttgccaatcagcgcttagccattggcgttgcgcgcacatcgcttcatataaacgcacactttgtaattcaataacttgtttaagttcttttttacttgaagtgaaaagttttttcgcttctttaatcagctctggatcgtcatttttgcgtgctgcaggtaatgacttaacttccttaccttcaggattaaacagaacaattttttgttttgcatccattttggcggtgaaagtacgctcaccatattccagtactaatgttcctgaatcatcaaagccggcggttggaatggttctatcggctaattcatcagcactccaaccattgcgttcagctatttgcgtaactaaattacgcgctttttcctgcacagatgctgtgcgataacgacgtgataatgaaagcagaagttgaatgataataggatcattacttgaagctaccgcatcaatcatcgcttcgatttgcgcacgacgctgatagtgatcacgcatatagttacgtaatactgatactgcaatatgcccctcaattccacaaataagcgcgagcattcctttatcgctgattgccgaacctaaataacgacgtagtacctcgtttttaatttcttcgacgacttgctctaaagtataggtttcatatttagcataatattcaggataacgtttggcccaatctttgtattgtgttaatcgagaaggggcattttgttgcgcttcagccatcgcttcttcaagtgttggtcctttaatatcttgagcgacaaaagtgtgcaggataaagcttgaaagtttatgttggctatcaacgcaaagtaggctgatataacgttgtaataacgcattaccccctggcatttttaatttgacggcgagaataatccaccaacgaataatcgcgggatcaaccgcttttttgttttcccatgttaatgcagggatcgcctcgaagttaaaccaagcaaggcttgcgggtggtttggctttgagacctttttcagcttctgctaataatgtctttggcgataaatagcttgaaatatcctcacctaattgttctaacgcagtgagcagagcggctcgtactacttcgcgtttctcttttttcagtaaggcattaagggcaggtaatgagtcagggttatttaaacgtgctaaccattcaatcgcggtgactcgaatttcttgtttacttgaagttaagccttcttgtgcacttaagtgaatattcggtaaggtttctaataatttctgagctgaaactcggtgtgttttattttcacctagagccaattccatgatacgcggaacgaattgtgcaggaatggttggaaaacggcttaatacttcaataccttgtgaagtttcaaattggcgatagcggtgttcactttgatttggcattaagtttagcgcttctgcaatataatcagtatgttgagagaagaaaggccaaacttgttctggtttacggaaacgacgtaagccatcttgataagattctaagcacagcgccgctgtgatacgcgttgcacgtttgaaatgacatcgttctaatacattttcaacgtgtcgtaattcaatatcactcaataaacgttcaggaatatcactattaaaatagtgagaggaaaagtgatccgcatgttggcggttattggtgatcacgcgcacggcatggaaaaaggtgtattcaggtaaattaggaatacggtttttgtgtttaattatttggatctcattgacttgaatagtgccttgtccgctattgagtttatccactaatgctcgacactgtttttcatcaattttagagagatctttataatggcgttgtgcccaattataagagtgtttagacgttttattttcttcaatttcacgttcagcattttcttttgcttttactaacatttcattgaagttattcaccagaatatcgcgggcactatcgggtaatggtgtgtcttctaagggagtaaaatcaggcgctttaatggcttcaacggtatttgcattatcagcaacacaaaaacgttgtagcgcactttcaatgctcttgataactgcttttgaggtttcatgttttaatgcttctgccagcacatcacggttttcaccttggcgcgcgaataaatcagcggcttgtgtacgttgtttgggagtaccattcattaaaacatgggttaaattttcttttacgatttcagcaggtaaggtatttaaaataggttcagccgtttttttgacggttcttaaactgctagtggcaagtaaaacaataatatctgcaaaagtatcgcgtaatatcgtatttttatttagataatttattagctcgactaagccattcgctgaaagtttttcaactaattcttttctaacaaattcttgatgtgaaagtagatagtcttttaaatcacacagttcataaatacgcttaagattagcggcataatattcagagacatcttttctatcaaaaattgcaaataacgcgttttcaccgccaatattggcctctgcttcgaccatattggcgataaactccatactccaatgtttacgatgttctaaattaaggttacgtgcattatcgtaagtggtataaaacgcatcaactaacaggtagataacccaagtggggacttgcgttgttgttactttaatattgatatcttgacatgcggcagcgatgactttggcaaaacgggccacttgctctaaggaaaaactttcaccaacctttgagtagagtttatggcgggcattaaggccttgggtgataaccttaccgtactttcctgtatcaacattactggcataccaccactctaatgttcccgcacgatgaaaataaacggcggctttcgctgcatctagtttatttaattcaaatagaatttcagggtttgtacctgtaagtacataatctaatgcacgcttaggtaaacttttatcaaatatagccagtaggacaagagagccttgaagatattgttcagtaatatcgacgtcttttttcccaaaaatagggagaatatctaatattttttttatcacgccagttccttaagccatgtatggataaacagttttttttaccatgaaacagtaaaacgaacaattttattattactggcgaaaataaagtcaaggcataacatttgttaaatatatggatataaacactgaaaaagccaatctaactttattaatattcaattcatcattatataaaatgcaatctcaggaaaaagtactaaaagttaagaagtgataataaaggcgttttttgtggattttaaaaagattaagaattgtctgtttaatttgctaagtattaacacttagtcctgtagataagttaatctttctattcttgattttttcgaaatgttacaaaataaaaagagcttcttataaatataacaagctcttttaaatatattattttgctgtttggcgagagaaagagagtaacaaagcacctatactacaaatcagcaaggtaatcgctaaactttgtccccatccagccagtgctaaaccaccaccaataagtaaatagtagaataaacctaatagtgcacccgctgtgcctaagcgatctttatattgcgctaaagccgtcgctaagatatttggaatagcaatgccataggcaacgacacttgtcatcattggaataataaaactaatgtgattgcgtaataaataaacacctacagcactaattactgcaataatacttgcaagtaatactaatttctcacattgccaatgatggcttaataatgctttattaatgtaagaaccaataccgacacctattgctaatacaataccactatagccaaaagtacttgcactataaccttgattatcaaacataaaaggtgctagttggtaataagcaaatagactgatattaaaaaaagcaattaaaagtatagtcttggcaatttgcttatctttcagcatttttatcgctgtttccgctagtggtgcggtttttattgttgcagggcgactttctggtaatgcaatagtactccacagcaataaaacgacggcgagaagagcaagaccactaaataccccttgataacctgcatagctcaccagtaaagaaccacttaacataccaatagccggacttaatgcgattgccgctcccataacggaaaatactttggctaattcttcaccactataaacatcacgcataatagtttgtgttcctacagagccaactgcggcaccaaaagcagaaagcatacgtaatatcagtaatacagaaaaattatcggtcataaagacaccaatacaagcaatggcataaataaataaccctgctaacattgttgggcgccggccaatgacatcacataaacgaccccatataatgacaccgagtgcaaaagcaaaaaagtagagcgaaagtgtttgccctgcttcattggcactgactctaaaaccatttgaaatatcagtaagtgctgggctataaatggtttctgcaatttgtggaaacatcattaacgcaattgctaaccatagagagagttttctgttcattctttgttttcctaaagcttgatactttgatgacagaatacagtgataataattgtcttgttatatatataaagacataatatttaccaaataggacaagtgatggcttggcttaatcaatacgaccactttgtgccagaagaacaccttgcatcagttgtgggtattgctgcagagatgggaaaacatgattcaggttttcactcacatgatagggggcagttactgtttactcaatcgggttgtatgagaattactttagcctctcgtgtatctgttttgccacccatgagaattgcctggatcccgccaaaactggaacatcgagtcgagatgtatgcggctgtaggttatcgttcagtttatattgccgataaatttcatcatcgtttcccaactgaaagcgaaatactgactatttcacctttacttagagagatattagagcgtattgccattgctgattttgacacccagtgggaagtagggcggtatgcaaatttattagctgtttttttagatgaaattcagcaagctaaacgtcaacctaatcatttatcaatgcccagtgatagacggttaagaaaattatctttcgatgaattacctccgccactacaagaattagcgcaatatattggcgctagtgaaaaaaccattactcgattattttataaagaaacaggattaagctatcaacaatggcgtcagcaatggcgattaatgaaagcgatagagttattagccacacatcatcgttatttagaaattagtcaattattagggtttgccagcgatagtgcctttatcactttttttaaaaaaatgaccgggcaaacaccacaagagtatttaagaaattgatccatgctaatagcataaagccccgcaaaaacggggcttagccagtcaataaatcgtgtttaaatcgatttatttatttttaagttcactatggaatttacgctcgttatagccagtatataactgacgaggacgtgcaattttcagtccatcttcatgcatttcattccagtgagcaatccaaccgatagtacgtgcaatagcgaaaatgaccgtaaacatatttgatggaatacctagcgcttttagaataatacctgaatagaaatcgacgttaggatagagttttttctcaataaaatacgggtcatttaaggcgatgcgttctaattccattgccacttcaagtaaactgtcattgagattcagttcttttaacacttcgtgacaagtttcgcgcatgactgttgcacgcggatcgtagtttttatatacacggtgaccaaagcccattaaacggaaagagtcattcttgtcttttgcgcgtttaataaattcaggaatatgttcaacggttttgatctcttccaacatacgtaaacaagcttcgttagcaccaccatgagcaggtccccatagtgaagcaatacccgcagcaatacaggcaaatggatttgcacctgaagagcctgcagtacgtacagtagatgttgaagcattttgttcatggtcggcatgaagaataaagatcctatccatcgcacgttcaagaactgggttaaccacatactcttcacaaggtgtggcaaacatcatatgtaggaagttacctgcataagacagatcgtttcttggataaacaaaaggttgtcctatggagtacttgtaacacattgcggctacagtaggcatcttagacagtaaacgatatgctgtgatatcacggtgaactggattagagacatcaagcgcatcatggtaaaaggcagctaaagctcctgtcacaccacaaagtacagccatcgggtgtgagtcacgacggaaaccatggaacagtcgggtgatttgctcatggatcatggtatggcgagtgacggttgttttaaatttatcgtattgctcttgggtcggtgcttcgccataaagcaggatataacatacttctaagtaggttgactcagtagccaattgcccaattgggaaaccgcggtgcagtaaaataccgttattaccgtcgatataggtaattttcgattcacaagatgccgttgaggtaaagcctggatcataggtgtaataacctttggagccgagagtacgaatatcaatgactttggaaccgagtgtaggggagagaacgtccaagtccacagaagtttcaccaatcgttaacttagctttgttatcagccatttataatctccttagcgcttattatgtctcctaacaaagtcgagggtatcttcataaagatgcacttcgatagtgaaactatagttgataaaaagtacctagcgagttttattttatggcttaacacgagtaaaaccgtaggtctatagtgtgtcacttttgttaaggagcttttgatgttatgttttttaggtgcttttttatgcaaggcacttagaatgtgttctgcttacacttttacataagttttcgatttctggaagcgtgtttgcgcacaaaaaaaacataaacattaaaaatatgcactaaatgtaagagaaatgttgtacatgtgtcaaaaatgataacgattattacattggatgtttgaaaaagtgatccctctcactgttcgaaccaaatgtctagcacacaagttgtgtggtaattgtaataagtttgtgaagcacttatactgcgcccaggtctccggaacctttgttgtatggagaaccagcgtaacgaatccacaatttttgtaaaatagacggatttaacattttacttaaagtgtgcctttgtaccccattcgctgcttaatttccatccaggtccggaggaaggaaaaattataaaagctgtgtgggcataaattgtgaaaaaacaaagacctgtcaatctggatttacagacgatacagtttccactccctgctatcgcatcgatcttgcatcgtgtctcaggggttatcatgttagtcgcagttggtattttactgtggttacttggcacctctctctcatctcccgaaggttttcagcaagccgctgatatcatgactggcttcttcgcgaagtttattttatggggcatcctaacagcattggcataccacatttgtggtggtattcgtcatatgttaatggacttcggctttattgatgaaacattggttgttggtcgtcgttctgcggcaatttcaatgattattaccgttattttatcaatattggcgggggtattagtatggtaagtaattcttctactttaggccgtacaggcatacaggattggttattcctacgtgcaactgccatcattattttcttatatgttttatattttgtcggttttgttgcaacaactgatattacctatgaagtttggcgtggattctttagctcctctctaaccaaagtttttaccctattaacgctactttctattctaattcatgcatggattggaatgtggcaagtgttaacggactatattaagccaatagcattacgcttgacgttacaacttattattgtcattgcgctgttggtttatcttatttatggaacaattgtggtgtggggtgtgtaatgaatctgccagttagagaatttgacgcagttgtaattggtgctggtggtgcaggtatgcgcgccgctttacagatttctcaaatgggtctgtcatgtgcactaatctcaaaagtttttcctactcgttctcatactgtttccgctcaaggtggtattacagttgctttaggcaatacccatgaggataactgggaatggcatatgtacgatactgttaaaggttccgactatatcggtgaccaagatgctatcgaatatatgtgtaaaaccggtccagaagctattttagagctggaacatatgggacttcctttctctcgtcttgatgatggacggatataccaacgcccatttggtggtcagtcgaaaaattttggtggtgaacaagctgcccgtactgctgccgctgctgaccgtactggccatgcactattacatactttgtatcaacaaaatttaaaaaatcataccactatcttttctgaatggtattcgctggatttagttaaaaaccaagacggtgatgttgttggttgtaccgctatttgcattgaaacaggtgaagttgtttattttaaagccaatgccaccattttagcgacaggtggtgcggggcgtatttaccaatcaacaactaatgcgcatatcaatacgggtgatggtgttggtatggcagttcgtgcgggtgtgcctttacaagatatggaaatgtggcaattccacccaacaggtatcgcaggggctggggtgttagtgacggaaggttgccgtggtgaaggtggctatctactgaataaagacggcgaacgctttatggaacgttatgcaccaaatgctaaagatttagcaggtcgtgacgtggttgcacgttctattatgattgaaatccgtgaaggccgtggttgcgatggaccatggggacctcatgccaaactgaaactcgaccacttaggtaaagaagttctggaatctcgtctgccgggtatccttgatctctctcgtacctttgctcatgttgacccagttaaggaacctattccggttattcctacttgtcactatatgatgggggggatcccaactaaagttaccggacaagctattcgcatgaatgaaaaaggcgaagatgaagtgatcccaggattatttgctgtgggtgaaattgcttgtgtatctgtccatggtgctaaccgattaggtggtaactcactgcttgaccttgtggtatttggtcgttctgcgggtgttcacttaaaagagtctttgatggagcagggcacgatgcgtgatgccagcgattctgatgttgaagctgcattaacacgcttacatcgttgggaaaataatcgttcaggcgaagatccggttgagatccgtaaagcattacaatcttgtatgcaacataacttctcggtcttccgtgaaggggatgcaatggcgaagggcttagaagagctgaaagtgatccgtgaacgcctgcaaaatgcccgactcgatgataattcaagtgaatttaatacacagcgtattgagtgcttagagttagataacttgatggaaacagcttatgccacagcggtatctgctaatttccgtacggaaagtcgtggtgcacatagccgtttcgatttccctgatcgtgatgatgaaaactggttatgccatacattatatcaaccgcaaaccgaaacaatgacacgacgtaaagtcaatatgcagccgaaactgcgtgaggctttccctccaaaagtgcgtacatattaattagcggtgttattgaagttgcggagactgaattatgaaacttgaattttcaatttatcgttataatcccgacgttgataatgcgccgcgtatgcaagattacacgcttgaagtacccgaagggcgtgacatgatgttgctagatgcattaattcaattaaaggaaaaagatcctacattatcattccgtcgttcttgccgtgaaggtgtatgtggctccgatggagtgaacatgaatggtaaaaatggtttggcatgtatcacacctatttcatctttacagaaaggaagtaagaaaattgtgatcagaccgttaccaggtctaccggttattcgtgatttaatagtggatatgactcaattctatacgcagtacgagaagatccgtccatatgtgattaacgacgacaaaaatcctccggctcgtgagaatctacagtcaccagaacaacgtgaaaaacttgacggactttatgagtgtattctttgtgcttgttgttcaacatcttgcccgtcattctggtggaatccagataagtttattggacctgctggactgttagcagcgtatcgtttcttgattgatagtcgtgatactgaaacagaatctcgtcttgatgatttaagtgatgcgtttagtgtattccgttgtcacggtattatgaactgtgtcagcgtatgtccaaaagggttaaatccgactaaagcaattggtcatattaaatcaatgttgctaaaacatagtgcataaattaataaccgccctaaaatagttagggcggttaatgaaaaaattaagttagacgtttgcaataagtagtctgtgtatttgtataagtttgtcttgatagcggtttttggaggcacctttaaacactgttagacagtttttaaaggttccttgagagtgaaaaactccaatattttaagaacctgcgagatagcgggtcataagagaaccttgcaatcgacaccgtttaataacggtactagttatccacggcgaactaaagctgtatagcttaagggatcataatgcagaacggcgcaatgaaggactggctagattccacatttctagcaggagagaatcagtcttacatagaagaaatctatgaagattacctaactgacccaaactctgttgacgaaagttggagagaaatctttcaacaactacccgtaagtcaaggcgcagaacagtcgcattctcaaacccgcgactacttcagacgcctcgcaaaagaatccactcgatatcatacctcggtaagcgatcctgcaatggactcaaaacaagttaaagttttgcagctcattaatgcgtttcgttttcgtggtcaccaaaatgctaatctcgatccgcttggtttatggaaaagagaatctgttccagatttagatcctgctttccataatctcaccaaagaagattttgaagaaacctttaatgttggttcttttgctatcggcaaagaaaccatgaaactcggtgatatctatgaagcactgaaacgtatttactgcggttctatcggtgctgaatatatgcatattaccaatacagaagaaaaacgttggatccaacaacgtttagaatctgtcaatgttgcagaccaatttactaaagaagaaaaaattcgctttttagcagaactgactgcagctgaagggttagaacgttacttaggggctaaattcccaggagcaaaacgtttctctttagaaggtggggatgctctgatcccaatgttaaaagacttaattcgtcatgcagggaaacaagatacccgtgaagtggtacttggcatggctcaccgcggacgtttaaacgttctggttaatattttagggaaaaaaccggcagatttatttgatgaatttgcgggtatacacaaagagcatttgggaactggtgacgttaaatatcaccaaggcttttcatctgattttgcaacagaaggtgctcaagttcaccttgctttagcctttaacccatctcacttagaaattgtgagtccggttgttatcggttctgtccgtgctcgtcgtgaccgcttagatgaagcgcgcagtaatatggttcttccgatcaccattcatggtgacgcagcagtgacagggcaaggtgttgttcaagaaacactgaacatgtcacaagctcgcggttatgaagttggtggtacggttcgtattgttattaataaccaagttggttttaccacatcaaatcctaaagatgcccgttcaacagaatactgcactgatattgtgaaaatggttcaagcacctattttccatgtaaatgcagatgatcctgaagcggtagctttcgtcacccgtttagcgttggatttccgtaatacctttaagcgtgatgtgatgattgaccttgtttgttatcgtcgtcatggacataacgaggcggatgagccaaatgcaactcagccattgatgtatcaaaaaatcaaaaaacatccaacacctcgtaagatctatgctgataagttagtagagcaaggtttaatcgaagctaatgatgttactgagttagttaatctctatcgtgatgctctcgatcgtggtgattgtgtcgttgaagagtatcgtcctatggggctacattcttatacatgggaaccttacttaaaccatgaatggaatgaagagtatccgcataaagtcgaaaaatcacgcttacaagatttagcgcgtcgtgtcagcacagtaccttctgaaatcgcaatgcaatctcgcgtcgagaaaatttatgccgatcgtgctgttatggctgaaggcgaaaaattactcgattggggggcggctgaaaccttagcgtatgccactttagtggatcaaggtattactattcgcctctctggtgaagatgcaggccgtggcacattcttccatcgtcacgcggttattcacaatcaaaccaatggttcagtttatgtaccattagccaatattcataacgcccaaggtcaatttaatgtttgggattctgtcttaacagaagaagcggtattagcatttgaatatggttatgctactactgagcctcgcgggctgactatttgggaagcgcaatttggtgactttgctaacgtagcacaagtggttatcgaccaatttattagctctggtgagcaaaaatggggtcgtatgtgtggcttagtcatgctgttacctcatggttatgaaggccaaggtccagagcactcatctgcacgtttggaacgctatctgcaattatgtgcagagcaaaacatgcaagtttgtgtgccttccacaccggcgcaggtttaccatatgttacgtcgccaagcgttacgtggtatgcgtcgcccattaatcgttatgtcacctaaatcactgttacgtcatccattagcggtatcgagcttagatgaattagcggatggtaaattcttacctgtaattggtgagttagatgaattaaatccagcggatgtgaaacgtgtcgtgatgtgttcagggaaagtttactacgatttattagaacaacgtcgtgctaatgggcaaacagatgttgcgattattcgtattgaacagctatatccattccctcatgatgatatggcacagattttggcaccttatgctcatgtgaaagattttatttggtgtcaagaagaaccgctaaatcagggcgcttggtattgtagtcagcataacttccgtgatgctattcctactggcgcaacattacgttatgcaggtcgtcctgcatcagcttctccagctgttggttatacctctgttcatcaggagcaacaaaaagctctggttgaagatgcactgaaagttgaataaataaggatagaaaatgagtagtgtagatattctagtaccggatctccctgaatcagttgctgacgcgacagtcgcaacttggcataaaaaacctggtgatagcattcaacgcgatgaagtgctggttgaaattgaaacagataaagttgtgttagaagtaccggcgagtgaagctggggtgctggatagcattcttgaagaagaaggcgctacggtaggttcacgtcaattattaggacgtattcgtcttggtgatagcactggtattcctgcggatgtgaaacctgcacaagatacgacgcctgcgcaacgtcaaagtgcagatattgttgcgaaagaaagcaatgatgctcttagcccgacagcacgtcgtttagtcgctgaacacgatattaatccagcagatgtaaaaggcagtggtgttggtggacgcttaactcgtcaagatattgaaagccatgttgctaataataaatcagcagcagcggccaccgctgaagtttctcaagctccattatcgcatcgtagtgagaaacgtgtaccaatgacacgtttacgcaaacgtgttgcagagcgtttattagaagcgaaaaatactaccgccatgttgacaacgtttaacgaaatcaacatgcagcctattaaaaatttacgtgcgcaatatggtgaagcattcgaaaaacgccacggtgtacgtttaggctttatgtctttctacattaaagcggtagtggaagcgttaaaacgttatccagaagtcaatgcgtctattgatggtactgatgtggtttaccacaactattttgatatcagtattgccgtatcaacacctcgtggtctggtaacaccggtattacgtgatgcagatgcgatgagcatggcggatattgagaaaaatatcaaagcattagcagtgaaaggtcgtgatggtaaattaaccgttgaagatttaacaggcggtaattttactattactaacggtggtgtttttggctcattaatgtcaacaccgattatcaacccaccacaaagtgctattttgggtatgcatgcgattaaagatcgcccaatggcagttgatggtcaggttgttattctacctatgatgtatctagcactttcttatgaccatcgtttaattgatggccgtgagtctgtcggtttcttagtgaccgttaaagaaatgctagaagatcctgcccgtttattactggatgtgtaggtaataaatatcgcttttaggcaggagatgctcctcctgcctctacagcaacatacacaagcatcaaagaagtacagtgtgttcgtgaagccagatttttctggcttatagtcaaaaaaataagaaagtccgactttcaacaagattatggatagaacatcatgaatttacacgagtatcaggcaaaacagcttttctcacggtatggattaccagcacctgctggtttcgcctgctccacgccgcgcgaggcagaagaagctgcatcaaaaattggccaaggcccttgggttgttaaatgtcaagttcacgcgggtggacgtggtaaagcgggtggcgtaaaagtcgtcaactcaaaagaagagatccgcgcatttgctgaacaatggttaggcaaacgtttagtaacttatcaaacagatgctaatggccaaccagtaacacaaatcttggttgaagctgcaacagatattgctaaagaactttatcttggtgctgttgttgaccgtggtacccgtcgtgttgtctttatggcttccactgaaggtggcgttgaaattgaaaaagtggcggaagagacgccagagcttattcatcgtgccattattgatccgctgacaggacctatgccttatcagggacgagaattagccttcaaactcggtttaaaaggcaaacaagttagtcaatttgctaaaatatttatgggattagcgacgattttcttagagcgtgatttagcgcttattgagatcaacccattagtgatcaccaaagatgatgatttgatttgtcttgatggtaaattaggtgtggacagtaatgcgttattccgtcaaccggaaatgcgtgaaatgcatgatccatcacaagaagatccacgtgaagcgcaagcggcacaatgggaattaaattatgtagcactcgatggcaatatcggttgtatggttaatggcgctggtttagctatgggaaccatggatatcgttaaactgcatggcggtgaacctgctaacttccttgatgttgggggaggggcaaccaaagagcgtgttacagaagcatttaagattattttgtcagatgaaaatgtcagtgctgtattagtcaacattttcggtggcattgtacgttgtgaccttattgcagacggtattattggtgcagttgaagaagtcggtgttaacgtaccagttgttgttcgtcttgaaggaaacaatgcagagttaggcactaaaaaattagcagatagcggtttaaatattattgctgctaagagcttaacggatgccgctaaacaagttgttgcagcagcggaggcaaaataatgtctattttaatcgataaaaacactaaagttatttgccaaggtttcactggaagccaaggaactttccactccgaacaagctattgcttacggtactcaaatggtgggtggtgttacaccgggtaaaggtggtacaacacatttaggcttacctgtatttaatactgtacgtgaagcagtggaagcaacgggggcgacggcgacggttatttatgtaccagcaccattttgcaaagactctattttagaagctattgatgcaggtattaaactaattattacaattacagaaggtattcctacgctggatatgctgactgtaaaagtaaaattagatgaagctggtgttcgcatgattggccctaactgtccgggtgttattactccaggtgagtgcaaaattggtattatgcctggtcacattcacttacctggcaaagtaggtattgtctctcgttcaggtactttaacttatgaagcagtaaaacaaactactgacgttggtttaggtcaatcaacctgtgttggtatcggtggtgacccaattccgggatcgaactttattgatattctgaagctattccaagaagatccgcaaacagaagcaattgttatgattggtgaaattggtggtacagcagaagaagaagcagctgcttatatcaaagatcacgttaccaaacctgttgtaggctatattgctggtgttacagcacctaaaggtaagcgtatggggcatgctggcgccattattgcgggtggtaaaggaactgctgacgagaaatttgccgcattagaagccgctggcgttaaaacagtacgtagtttagctgatatcggtgatgctgttaaatcgctattaaataagtaacatttttgttaattgcttctagttaaaactacatatcatgccaatctctgatcaaactggagattggcattttttattgttctattttatggcgcctttaggtgctgtcagcaagtagtcacgtgtatttttgttcgattttatctcatcttattgtttttaaatatatttttatttcattttttgtgtgttaaatagtgatttaaacacagcaataacgaaaatatggcgctaaacaagaatacctgagccctggtttgctaaaaaatgcggaatttgttttactcagcctaactgatatgaagagtaggggaaggcaaaaaaagggatacttttagtataatttttattcattaatactatgtgtataagatttactatagttaatttatattgtttaacgataccttattagcagataccccccctcaattattatcatttgttagtattattggaagggcacaatcttgccctattgcagtatggtgaaggtttcatagtgaaaaatgtattatagatacaataatgctcgaaagagaagtttaatgagtagcagagtaaccatgctaaaaaaccgaccttctaaaataacattaaactatcaactatcagctaaactttatagataaagcttaaaaataatcattcttcaatacagttatgccattttgctacccatatttaaaaataaaatgattgtatattgttgttttacaaaggaatattatttatttttatggcttaaggtatgattgctatagagtgtatgagttatttttattcaatggatagatacattatttatcctaaattaaactttgtattaaaaaaagattatcattataagagtttatttatgttttaggttcgctcgataaaactaaattaaaaaagataaaaaattaaaaatttattttcaacttattaattaatagattattttttttaaatatcccttttttacctgaaaaaaaatgtttttaatattagaattaatgaaatacagctaaatatgactatttaaatgtatttatgaaaataaaaagttaattttattatggaaattaatgggaggtaaattatacttaaaaataaaaccaacagtaaattaacattacggtaactattgggtaatttattcgcaactagttaacattaaagtgtttttttgatgtgggtcaagttattaattgtggaaaaattttctaaatatgcttaaattggcacacgatcaaatatgctgttactaacctaaaagtcgtattgttgacctaagctcagaattcaaatctgggtcacgcaaaatatatttattatatgtaaatataggcgtactatttgtaaggtattgtgtttttggtctttaatattcgttgttgtttttagaggcatttattgctggtagttatgaggctttatttattaattaaagtcgggttgccgcaagtcggtgtcttcctgctaggagcaaggagtcaagatgtttgatattgtcgaactgtcacggttacagtttgccttaacagcgatgtatcacttcctgtttgtcccattaacgctcggtatggcgtttatgttggcaatcatggaaacgatatatgtcctgtcaggtaaacaagtttacaaagatatgacaaagttctggggtaagttattcggtattaactttgctctgggtgtcgcaactggtttgaccatggagttccaatttggtactaactggtcatatttctctcattacgttggtgatatcttcggtgcgcctttagcaatcgaaggtctgatggcattcttcttagaatcaactttcgtcggattattcttcttcggttgggatcgtttaggcaagaagcaacacttaatggtaacttggttagttgcctttggttctaacttctctgcgctgtggatcttagtcgcaaatggttggatgcaaaaccctgttgctgcagacttcaactttgaaaccatgcgaatggaaatgttgagttttgctgatctggtcttaaacccagttgctcaggtgaaatttgttcacaccgttgctgcaggttactgtactggtgcattctttgttttaggtatcagctcttactacctactcaaaggtcgtgacatcggttttgcaaaacgttctttcgctgttgcggcaacctttggtatcgctgcggtattatctgttatcgtactgggtgatgaatctggttatgaaatgggtgacgtacaaaaaaccaaattggctgctattgaaggtgagtggcatacagagccagcaccagcttcctttaacttgattgcattccctaatcaagaaaaaatggaaaacacgtttgctctacaaattccatatgtcatgggtattatagcaacacgttcttttgatacgccggtattaggtctgcatgatctgatgagccagcatgaagtgcgtattcgtaatggtatgaaagcgtatgacctgttaactgaactacgttcaggtaacactgatcctgccgtacgagctgcatttaatgagtctaaaaaagacttaggctacggtctattattgaagcgttatactgaaaatgtttctgatgcaactgaagagcaaattaagtcagctgtaaaagattctattcctaacgtcgcaccacttttctggtcattccgtatcatggtcgcggccggcttcttgatgttactggttgttgcgatctccttctggactgttctgtctaaccgtatcggtaactacaaatggttactgcgtgctgcgctatttagtattccattaccatggattgctgttgaagcgggctggtttgttgcagaatatggacgtcaaccatgggcgattggtgaaatcttgcctacggctgtagcaacttcttcactgacacaggctgatattctcgtttctatgggacttatctgcggtctgtatactctgttcctcgttgccgaaatgttcctgatgttcaaatttggtcgccttggcccaagtagtctgaaaacgggtcgctatcactttgaacagaagacagcttcttctgcacaaagtaagtaacacaggagtccactatgtttgattatgaagtattgcggtttgtttggtggctactgattggtatcttactgatcggctttgcggtcaccgatggttttgatatgggtgtcggtgtgttattgcgcgtcattgcaaaagatgacacagaacgccgtattttaattaactctgttgcacctcactgggatggtaaccaagtttggttaatcactgccggtggtgcattattcgctgcatggccaatggtatatgctgcggcattctctggtttctattttggtatgatcttcgtactggcggcattattcttccgtccagtaggttttgactaccgttctaaattagaatcaccaaaatggcgtggtatgtgggattggggtatctttattggtagctttgttccaccattagttatcggtgttgcttttggtaacctgttacaaggtgttccattagaagtcgatagcatgcaacgtgtatcttataatggtacaactaacgcactaattaacctgttaagcctattaaacccatatggtttattagctggtgttattagcttaatgatgattgtggcacagggtgctagctatcttcaaatgcgtactaccggtgagctgcatgagcgtactcgtaaagcaacttacattacctctttaatcacttttattgcttttgcattagcaggcgtgtggttaatctacggtattgatggctttattatcactagtgcggttgatactgcgggtccttcttctccgttgttgaaaacagtttctcacgaagctggcgcttggatgacgaactacaacaactatcctattttatggatcttaccggcattaggtctgttaagtcctttattagcggttgttgcaactaaagcaaacaaaggagcttgggcattcctgttcacttcactgactattgcttgtgttatcctaacgtttggtgtaaccctgttcccattcattatgccatcaagcacattccctgatgtaagcttgacaatttgggatgcaacttcaagcctgttcactttacaagtgatgacagtagtcgcgattatctttgtacctatcgttctcctctacactatctggtgttactggaaaatgcatggtcgcctcgataagaaatttatcgaaggcaataatcatactctttactaaggagcatagagaatgtggtattttgcatggcttctcggcacactcttcgcttgtagtattgcggtgatcgcaggactggcttatgagcacgctgaagcgaaaaaaacttcagaaagtgaagaataatgttggataaaagttaccaactacttaacaagggcccaattagggctcttgttttaatcatggctctagcaatggcattttgtgttatgtgggatccgagtcgattcgcggctaatacaagctcattagcgatttggcaaggaatattactgatttgggctgtatgtgcaggggcagtttttggcttagcctatcgtcctaaacatgttgtagcgcaatatctattacatcccattcccgccattattattttagttgtagggctatattatttcttcttctaatcaaaatgccttattttaacctctagtaagtggcgtaaaataaggcattcacttcttgtatatgggttatgcaatattccccctcaccttttagggcatagaattaattctctcttttaaaaaatcaataaatagacgggtttttcttggcatatgttcaccatgtggaaaaatgacattaatagattgatttaataaggtaagttcaggaatagggctaacaagttcaccctgtgttatttcttgttgaatgtaccactctggtaatatagtcattcccatttgtttgagtgccatctgttttaatgcactaatagtattcgtttcgaaaagtgccattgagtgcaattgtgaaaatagttgattgattttatcttgttggctgagtttgctatggcgtaaattgctgtttgcaagatagggaactgccgctaaatctgcaatttcttggataggatattttttcaataaatgtggtgataccactaatttgattgtgtaatctgctaatttgcgatagcgataattactgtcttttaatgcgccaaggcgtatcgccaaatctaacttatgattgataagatcatcaatagaagaattgaatatatattgcacttttagttgagggtgtaaacacataaattgatgtaaaagtggcaatatataatgttcaccaaattcagccgttgaagttaatcgtaaagttccctgtaagttttgttgtcctaaccgtgccttatctaatgtttgttcgagttgaactaaaacttgacgaaaatcttgataaaggatttctcccgtttcagttaatgtgaagcgccgagtattccgattaagaagagatacatttaattccgtttctaatgctttaatatgaatactcaccattgatttacttaagcgtaaatactttgctgcttgtgtaaaagagcctgtatctactacggcgataaaagaacgaattcggtctatttgattttgcatgattgtttactctgattaaacaataagttctattttgtcagatagacgatattcgtcaatctttcgtaccctatagggcggaggattgctatgtcttatcgttatcaaatagccattatttttttactgggtttttttattgattgtataaatatttttatgtcggcaattgcattaccagcaattgcagcggatatgaaggtatctatcgtctccattacatgggtatcaaatagttatattttaggtttaacactgattattccattgagtcactggttatctcaacgttttggcgtgagagtattaatagtcagctcgatgttgatatttagtgcttctgtggcgttagtaggctattcacactcattttttgagctgattttatggcgttttattcaaggtcttagtggtggattattaattcccatcggccaagctttaacatttcagtattttcaagggcatgaaagaagcaaagtctcaactttaattatggctgttgctcttattgcacctgcaatttctcccacaataggtgggtttatcgttgatgctgtatcttggcgttgggttttttatagtaatgtgcctttttcattacttactgcgtttttggcttttatttgggtaaaagagtctaaatcacaagaaaatataataccagatcttaaagggatcttattaatcagtattattatcgtatcagggttatgtgcattatctgcttacggtgagtatcactctacacaattagcattagtcatcagtttttttgctgcattattttctcttctttattatcgtcattataaacagagtttatcaccggtaattaatctaaatttattaaaaaatagaaacttatcactttccatttttctctattactgtattccaggtgtttttactggtgtaaatattctggcgattttttatttacaacaatatctccatttttcggggcagggtacaggcagttttatgctgctatatgctataggtgcatttatttccattattgttggtggtgcactttataataaattgggtatgaagcgcttagctatattcgctttaattctgcacagtattggtattgtattattagcattagtaaataaagagagcgatctgcctttattaatactggcttatttaatgatgggaattggtggagggatcggtgcaaatacagcacaaacaacggccctttatgactttgataaacaaaggcttattcaagctagtgttatttggaatataaatcgtcaagttgtatttagtgttggcgcgacacttgttgcaatgatcttcaacacattatctctttttgtatcgtcacaaatggcttatagcacgacattttttatctgtgcaaccataggattatttccgctatttcttttcatattgttaaagcaaaaaacaaacttacaggaaacaaatcatgagcattaaaatagacccattaatagaaagtgtgcaagtgttgcataatgagattgaaactgtttttactcaaacccctattgctacacaggcattaaaaaatatagaaatgttacttgccaacacgttttctatgattggtataacaggaaagaaaataaattatgatgatgtaatggcaatgttttctcgtaatgcagggaaaaggccagaattgaggattgaaacagatagttataacattatttaccaatctgaacattgggcaacggtgagctatcgtgaaacgcattatgaaaataagaagattctcacccgtcaatctgtggtggttttgagacgcacgtctctagattgtcaatggcagtggtattacttgcatgaaacacctgtattagataattaattgattttaataaaaaaccagtaataagactggtttttttattggttgggaaaaagtttgaatcagagtgctaaactattaattgttaattagcaagcattttaatgctgaactaataaaaatattttttctattcaggcgctaaagcatattgcgtgttgcaaagaagagtttatgattggcgtctgaaaacggtgttttctattctttacgttactatgattcccttagaggcacctcttaagtatagttaacaaatctatagcttaattatttatgggattactcaaggagtgtaaggacggaattatgcggtttctttggccagttcgtgtctattacgaagatactgatgccggtggtgtggtctatcatgccagttatttaaaatattttgaacgtgcaagaacagaattactcagagaaaaaggtttttatcagcatgatttacgggagtatgatcatgttgcgtttgttgtgcgtaaattaaccattgactatattgcgccagcacggctcgatgagcttctgaaagtagaaagtgaaattactacattacgtggtgcatcaatgacattttctcaaaagcttatcaatcaagatggtgtggtactgtgtagggcagatgtattagttgtctgcgttgattcattaaaaatgaagcctgtagggcttcctaagtccattatcgcggagtttaagtagtggctgacatgaatgttatcgatctctttctaaaagcggggcttttagttaagttgatcatgttgttattaatcggattttctattgcctcatgggcgatcattattcaacgtacgaaagtattgaatgcagcagatcgtgaagcggcagattttgaagataaattctggtcaggcactgatttggctcgtctatataaagaaagccaagctcgtcgtgacgagttatcaggggcagaacaaatttttcattctggttttaaagagtttgcacgactacatcaagcgaatgttcatgcacccgatgccgttgttaatggggcttcccgtgcaatgcgtgtttcatttaatcgtgaattagagtccttagaaacgcatattccttttttaggtacggtggggtcaattagtccttatattggcttattcggtacggtatgggggattatgcatgcatttatcgctttaggtagcgttaaacaggcaactttacagatggtggcacccggtattgctgaagcgttgattgcaacagccattggtttatttgcggccatccccgcagttatggcttataaccgctttacgcaacgtgtaaataagttggaacaaagttacgataactttatggaagagttcctgacgattttacatcgccaagcttttgtctccgcagaaaagaaatagttaacgcaaaaggagagagctgatggcacgaggtcgcagtagccgccgaggcgtaaaatcagagattaatatagtacctttgcttgatgtgttattggtgcttttgctgatttttatggcaacagcgccaattatttcacaaagtgttgaggttgatcttccacaagcaacagaaacacagactgtttcaaccagtgataacccgcctgtaattgtcgaagttgcaggagtggggcaatataatatccgtgttgaacaagaggttttagagcttttacctcaagaacagattatggctgaagcaaaacgacaattagaaaaaaacccgaaagcggtctttcttattggtggcgctaaagatgttccttatgatgagataattaaagcactcaacatgttacgtcaagcgggtgttaagtctgtcggtttaatgactcagcctctttagtaggctgaaataagtttggataatagcgtgggaaagaagacgaaaccaatccgaagtaaattgagcggttcagttatcttgtctactgtcttgcatttactgatcatcgctttgcttatctggggatcgttaactcagaaatggaatttaggcggtggcggtggatctgatgggcaagttattgatgctattatggttgaccctaatgcggtagtacaagagtataatcagcaaaaggcgcaacaagctaatgtccaaaaagcagaacaagaacgtaaagcgcgggcgcagcaacaagaagaagagctacgccaacaacaaattaaagaacaagaacgtttaaaagcgttagaagtggaacgtttgcaagcaaaagaggctgcagaagctcaacgtcgtgaagcagccaccgccgctgctaaagcgaaagaagagcaaaagcaggctgaagaagctgccgcacaagctaaagctgaacgcgatcgtattttaaaagagcaagctgatgcgaaagccaaagcagaggcagaagcgaagaaacaagcagaattagcagcaaaacagaaagcagaagaagcgaaggcaaaagcagaagctgaggcaaaagcgaaggctgaagccgatgctaaagcgaaagcagaggctgatgcaaaagcgaaggcagccgcagaagctaaagccaaagcagcagcggaagctaaagcgaaagccgctgcacagcaacaaagtaaagcggttgatagtctactcgatggattagttgctcaaggcgataaacaatcgggggcttctgcagcaggtcaaggtggtggtaatcgctctggggcaaatgctgcgggcattgatcgctatactgggcaagtaaaagttgccatcgaacagaagttttttgattctgatttatataaaggtcgtaaatgtgaccttaaaataagtattgcaccagacggtatgttagtaagtgcaaaagcggtaggtggtgatccggctttatgccaagttgcattacaagcggctaaaatggcaacattgcctaagccaccgaaagatatttacgaacaagtaaaatcaccaacaattgagtttaagccataaaactgtctgatagtaggaaaacatacattaatttatctctattttagaatgttattgatgtgttgtatggtgttgtttaaaagcgtttgttactattctgtgcgttattgcgcaataaccgcaataataaaagggagacatgatgaagcaggcattaaatgttattttcggacttttgatattatgcgttacaacgctcgctaatgcagaagttcgcattgaaattacacaaggggtgaatactgcacgccctattggtgttgttccttttaaatgggaaggcacaggtcaaatgccagaagatattgctggagtgattgcggctgatttacgaaatagtggtaaatttaaccctattgatatgaatcgtttgcctcaacaacccgttaccgcttctgaggttcaacctgcactctggacagcattaggtattgattcagtggttgtagggcgtgttcagccctcggcagatggtcaatatgttgttagctatcaattagttgatgttgctggctctccgggagcggttttagcgcaaagtgagtataaaatcagcaataaatggttacgatatgctgctcataccgccagtgatgaaatctttgaaaaattaactggcattcgtggtgcgttccgtacccgtattgcttatgtcgttgtgactaatggtggcgcttatccatatgaattacgtgtatctgactatgatggatttaatcaagatcgcgtttatcgttcatcacagccattaatgtcacccgcttggtctcctgatggtgctaaactagcatatgtcacatttgaaagtggtcaatctgctttagttgtacagacattagcaacgggggaagtgcgtcaaatcgcttctttccctcgacataatggtgcacctgctttttctccagatggctctaaattagcctttgcactgtcaaaaagcggtagtctaaatctttatgtaatggatttagccagtggcaatatgacacaggtaaccaacggtagaagtaataatacagagccgacttggatgcctgatggacagactttggtctatacttcggatcaaggcggacgtcctcaaatttataaaattaatattaacggaggaacgccagaacgtattacttgggaaggaaaacaaaaccaaaatcctgcagtaagtcctgatggtagtttcttagttatggtgagttctgaaagcggtaggcaacatatcgctaagcaggatctagaaacgaatgctgttcaatatttaacagatacgtttctggatgaaacgccaagcatcgcgcctaacggcactatggttatttatagctccactcaaggcttaggaaccattttgcgactagtatcgactgatggacgtttcaaagcgcgtcttccggcgactgatggtcaggttaaatcacctgcctggtctccgtttatgtgatgcataagaattatgtatggcaaacaaataaaggaacaattagagatgcaattaaacaaagtgtttaaagggttgatgttagcattaccactcgttgctgttgcagcatgtagctcaaacaaaaacgacgatcaaacagatacaagcaacaatgtacctgttactgagcaaggccctactgctgaagaattagcacgtcagcaattagaacaactgaaacaaactaacattgtttacttcggttttgataaatatgacgttacttcagaatatgctcaactgttagatgctcacgctgcattcctgcgtgctaacccttcagtacgcattactatcgaaggtcatgctgacgaacgtggtactccagaatacaacatcgcgttaggcgaacgtcgtgcaaacgcagttaaaatgtatctgcaaggtaaaggcgtatcagctgatcaattagcaatcgtatcttacggtaaagaaaaacctgctgtactgggtcatgacgaagccgcttatgcgaaaaaccgtcgtgcagtactggtttactaagagaacggcatgaacaacagtaacttcagacctttattgatgagtctgttgttactggttggcgtagcggctcctgtagccgctattgcccaagcgccaatcagtaatatcggttcaggctctactgatgaacgactcgcccaacttgagcgtatctctaatgctcatagtcagcttttgacccaattacagcaacaactcgcagattctcaacgcgatattgatatgttgcgtggtcaaattcaggaaaatcaataccagttaaaccaagttgtagagcgtcaacgtaatatctatcaacaattagatagcctaaatggtggcaactcagcaccaacaacggatgaggcttcaacgggtggcaatgtaccttcaacatctgatacaagtacgagttcgtcgtcaacaggtgatgaaaaagccgattataacgcggcaattgatattgtattgaattcaaaagattacgataaggcaattgttgcattaaacaactttattaaaagttatccgaagtctagctatcaatcaaatgctcaattttggttggggcaaatgtattatctaaaaggtaataaagatcaggctgcgagtacttttgctattgttgtgaaaaattatccaaaatctcaaaaagcaagtgaggccttttataagatagggcttattatgcaagagaaagggcaaaaggataatgcgaaagctatttatcaacaagtggttaagcaatatccaaacagtgctggtgcaaaattagcacaaaagcagttagcagcactataattattggccccgtaatgtgaatgttacattttcggggttaactgattgttttttcagcgtttgaatgtttttttgaaaaaaaacgttgcacaataacattaaatcagtattattacccgccgttgccacagagaatgtggcgagttcgaaaagggtcgttagctcagtcggtagagcagttgacttttaatcaattggtcgggcgttcgagtcgcccacgacccaccattttcgaatttacataccattttatgaaatgggtcgttagctcagtcggtagagcagttgacttttaatcaattggtcgggcgttcgagtcgcccacgacccaccatttcaatatgcttttctagtcttttatcacacgccattctcattctatctaaaaatgctctctataactcgtttttgtatttattactcgagttactcaaatagaggatgtaaatagatagcttctccattgctgaaaaaactatctgatctcacttaagttggataatgacaaataatggaagtggttatttggtaatattcattttcagttaatagttcattatcaataaaccaatcgctaataagtgtttgagcttgtgttgccttttctatcgacaaaccaaaacgctttgatgcatcaataaaaaaagccatgataatacttaatgcagccgctgcttcataaggggtactcatagccagtgtgctttctaatgaacgtaatgagtaaaacttaggtaaccactcccgtaagtttttgccttgataccagacatcttgtgttgatgtttgcagagcaacttgctctagtaaacggatcaaccattcccttatatcactcatacgatattcagcgaaccaaaattcattacgtaagatagctatagcgatttgtgtggcttcaaaccaaaactcttgagccaaggcatcagcttgctctatggaaagggctgggggagtcacagtgctaatttctggaagttggtcacataaacctgttttatcaagtaaaacacgatagcctcgttgataaactggacttagaccattttgtttcatattgataattctttcaggctctgccatcaaaatatccatttttcggccttgagctaatacgtgcaaatagattggccagcgaatgccgttcggatcttcacattctgttgctaaagagacgaggtgtttaccaaattgtgatagccaatgttggttttttgctagctcagtcgcaccgtgaccaataagctctatatcaatatcagaatagctgtctatcttcttattacgacccactgagcctgttaataccacagcctcaattcgaggatcaagtaatgtaaaagataacatgcgatcgattaagcgggtgattggctccatatttctctctagttgttatagtagataaagttatttgttgtaagtatgaataaaaaaatagcatatttattatataaaacactttttgttttttatggtaaataaatggcattttgtttaatattttaaactaagtgctatcattgataggaatgtatatatatctttatcactttgcaacaatgtcgcaataacccatattttatttgttttttctatgattaagtcggggttgtcaaatggatgtcattagttggtttagtatcaataatattttagtcaatattccattaggaaaagaaggctatccactctcatggattgaagctatagggactattgctggattattatgtatatggcttgcgagccaggaaaagatcattaactatttatttgggttaattaatgtcactttattcgccattatttttttccagatccagttatatgccagtctactgctacaaattttcttctttgctgccaatatttatggttggtatgcatggagtagagtgaatgattttgaacaagcagaattgaaaatacgttggttaaagccgggccaacaaatcgtattaatcattgtctccattgctgccattattgcgctaacgtttaatattgataccgtttttggctatttagcagttattgctgttgatatcttaaatgtcttcggggcaaatttagccacacctgctatcgagccagatgcttacccattctgggattcaacaatgacggtactctccattgtggctatgatcttaatgacacgcaaattggtagaaaactggttaatttggtctgttattaatgtcattagtattgttatattttataaacagggtgtttatgccatgtctattgaatatatcatcttattggctatcgctattaatggctctcgtttgtggatcaaatcagcaaagcattcaaacaaaaataattatctctcataataaaaaaggctggtagagttatatttctctccagccttgctattcgttgtgtttattcttctattctaggcaatttcaaatcattattttacttaatggtgctattacttgttttcgatgtttttgttatctatcgtcatgggctgtttaggctcttaagggtgtttacagagagaaaacgaatggttagattgaagaaacagaaatcatattgactagataataatagagtggaacacgggaatgaattaccagaatgatgatcttaaaataacacaaatcaatgaacttttaccgccagtggcattattggaaaagtttccagccactgacaatgcggcgtttacagttcgtcatgcccgtgaagctattcatcaaatccttgctggaaaagatgatcgcctattagtggtgattgggccttgctctattcatgatcctaacgcggcactggaatatgctcagcgtttaaatttattaagagaagagctgaaagataaacttgaaattgtgatgcgagtttattttgaaaaaccacgtaccacagtcggttggaaagggctgataaatgatccacatatggactgtacctttgatattaatgaaggattacgcattgctcgtcgtttgctattaaccatcaatgatagtggattaccaacggctggcgagtttttagatatgataaccccacaatatgtcgctgatttgatgagttggggagctattggtgctcgaacaacagaatctcaagtgcatagagaattatcctccggactatcttgtcctgttggttttaaaaatggcacagatggcacaattaaagtggcgattgatgccatcaatgctgcaggctctccacactgtttcttatcagtaactaaatggggtcactcagcgatagttcgtactgcagggaataaagattgccatattattttacggggcggtaaagagcctaattacagtgcagaacatgttgctgccgtaaaagaaggtctgaaaaaagcaggattaccccaaaatgttatggttgattttagccacgccaatagctgtaaacaatttaagaagcaaatggaggttggtgccgatatttgccaacaaattagcgcaggagaaaaagctttaattggtgtaatggttgaaagtcatttagaagagggcaatcaatcattagaaagtggtgaacctttggtatacggtaaaagtgtcacagatgcttgtattgggtgggatgatacagaaacgttattacgccaattagccgatgcagtcgctactcgtcgtaataaatcataatagtctgtttttattaataaaaatgccactcaaaagtggcattttttttatctaattcaaagtaaaagtaaaattattttgctttaccttggttagcaacagccgcggcttttgctgcgatttcttctgcattacctaagtagtaacgtttgattggtttcatattttcatcaaattcgtaaactaaaggtactgctgttgggatattcagttcaagaatttcttcttcactcatattgtctaggtatttaaccagagcgcgcagtgagttaccgtgagcggcaataatcactttatcacctgaagcaacgcgaggtttaatgacttcttcccaatatggtgttacacggtcgatagttaacgctaagctttctgttaatggcagttcagcttcagttaaagatgcataacgtggatctttacctgggaagcgatcatcatctttagttaactctggtggggtaaccgcaaaaccacgacgccattgtttaacttgctcgtcaccgtatttttcagctgtttcagctttgtttaagccttgtaatgcaccgtagtgacgttcgtttagtttccagcttttctctactggcagccattgttgatcaacttcatcaagaatgttccacagagtgtggattgcacgttttagtacagaagtatatgcgtagtcaaaagtaaaaccttcagccttcagcagtttacctgcttcttgcgcttcattacggcctttatctgacaattcaacgtcagtccagcctgtaaaacggttttctttgttccatacactttcaccgtgtcgaactagcacaagcttagttactgccatagtttagactcctataattactttcttaatataagtttaaaatcaggactgcaatcattatatggatcatcaacaagaacgccaaacataactaacaaaactagggggattatgtcaaaaatgacgattgtttgatgaaatattacacagttattacaccttttgcttaatcgataaagctattaatttaacgggatcggtgaaaagaaacgaaaagccgattctggataattatcagtaaaaaatatgctctctaaatctatcgttaaaatcatcgccatctatcgataacaaatacccttttcttcagtgtgatgatgtatcttaccttaaaaatagcctatatctagttaacagggttgttgttggtaacgatagatatctccttctttaataaaaatcagtcgatgggtaatacagtgaggtgcatcttcttgatgatgactgacaaacagtagttgagtattgctatggcttatcatgatatcaataaagcgctgtactaatagtctattggttgtatctaatccttgtagtggttcatcgaggatcaataatgtcgggtgtttaaccaatgctcttacaattaatactagacgctgttgtccccatgaaagtgagtgaaaaggatggttagcgagtgcagttaaaccaattagtgttagccattcatccgctaatttttgctgtttatcggtaacggcttgataaataccaatagagtcatgaaaaccagaaataatcacatttttcacacttgaagagacgcgatagctttgatgtaaggcattactaacataaccaatatggcgtttgatctcccaaatggtttcaccactgcctcttttacgaccaaatagtgttaaatcattgctatagccttgaggatgatctcctgtgattaagcttaataaggtcgattttcctgcgccattaggacctaatatttgccaatgttgttgtggtttaacttcccaggttaagtgatggagcacaggtttatcattataactgaccacgccatccttaagtataataggggaaagcgttggtggtaaggtaggaactgcatcaacggagtctgaggcgggtaagatcagattttcaagtgtttcactgtgagataattgcgcaattactgagtctgataaaatatcactttttttaccttgtgccacgagtttacagtcaatcaataagccagcattttgcacaaaatcaggaatatcattaaagcgatttaaaataagaacaatcgttagcttttgttgatgtagtgatgaaagtaactcacttaatgtacgacgagagtcaatatctaaaccatcaaaaggctcatctaaaattaatagatcaggtttattcatcaataactgaataagcagtaccttacgagactctcccgttgaaagatatttaaaacgccttgataaaagtgcatcaataccaaattgttttgctaataacaggcagcgatcattatcttttacctgcatttggatcacctgagccacggttaatcccgtatcatcctcatcttcacttaataagtctgtattgttacgcagccactcttcctctatcattttttgtaatttttcaaaagagagattaatcggacgagtaaacctattaataagctcacccgataataaaatcccctcttggcataatgtattagcgagcgccgttttaccactaccattgctaccaacgaatgcccaactttctccttcattgatagttaaatcatcgatatgcaagcagagtgtatcacttaagcgaaacagtgtttttgtgagttgcaagtacttcattattattatccttgtttttattacaagtagaatacttaccaatatcggtttaattaaaacttgtcaatatttgttgctgatcgcttaagtaaaaatagtgcagagagaataaaaaagataaaagatgggcaagattatttatgttattttaataaaaacataaggactcgtttatatgaataacattaaaagggaatgtgttaactatttattaggattaatggcgctatttttattaacgataagtaagataacttttgcagaaataaataataatgtaaataattgcttcttaattaatgaaataaaaatagaaaggaatggtttattaactaataaggcacaaaaagaattaatatctaaatatataaataaatgtttaacattaagtgatatgcaacatatcattaaatcaatgactaatgcgtatattgaaaaaggctatattacttcacaagcttttattgccgatcaagatctctcaaatcatcagttaaccattaacgtaattgaaggaaagataaaatcaatctttattgataatatgacttcccccatggttgatattctatttccttcatatcaagataaacgacttaatttacgtgagttagagcatgggcttgaacaactaaatcgattaacaacatcacaatatagattagatattcaacctagtgacaggataggatactcgactatttttatttataagaaaaacaaaacgcatcctttcagaaatcaacttactattgataattcaggttcaaaagcaacaggtgaaatgttactgacgaataccacaacaatagattcgttatttggatttggagagcagtgggatctctccttaaacagtaatacagatttattacattcacattattatagaggctatacagcgagtataaatattccctatggctattggttttatcaatatcagttatcttataaccgttcttctcattttattaaaagttatagtaataaatatatctataaaagtataaatactaatcagcaagttgatattagtcgtttactttatcgggatagtaagaagaagataatattaaaaggcatattaaagcataaaaaagtaaaaacggaattagccaaacagccgatattaatcaatagcccaacattaacatcactatcattagccccccaatatcattttaatctgacatcaggttatttatctattaatccatcagcagaaattgggttgtctttttttggggcatcacctgattatattgctgaaaactcaccccgaagccactatagaaaattgagtctaaatatacattatcaatatttatttccttactctgtctcctatattacgtctttttatggtcaatatacatctgataatctttatagtgtggaaaaaatatccatagatggattaaatgcagttcgtggtgctaaacaaaataagcttagtgccaatagaggactttattggcgtaatgaaattaatacaccatggataaattcatttttaggtcaatggcgttttattacagctgttgattatggcgttatctattctgatcaatatgaaacaaagcagcagtctttattagctggcgctatggggctttcattttatcgttcccctttttcttcacaactattgataaacaaaccattcatttatccaaagtggttaaatgctaaccaatggtctttatcttggtcaatttctttcgctctttagataaggaagttttttatgcataaaaaggatatttcgcgaaaacagcgtttaataagctattgtgttatttatttaaccgctatttacccattgcatcctgcttggggctctgtcattacttcatctgataaaacgataacaataaaccagcaaaataatattcctattattaatattgcaacacctaatgacagtggtgtttctcataatagatttaatgtctttaatgttaataaacagggggcagtacttaataattcgcaagttgatgccaatagtcaattagcaaaaaaaatatctgctaataaaaatttaaaaggtaatacggctaatttaattattaatgaagttgtcggtaatagtcgttcacagttattaggtaaattagaagttgcaggacaacaagcggatgttttaattgctattcctaatggaattagttgtgatggttgctcatttattaatactccatcaattactctcacgacgggaaagcctcaatttagccctcaaggtacctattcggcactagaagtaaaaaaaggcagtattgttattggtaagcaaggtatgaatgccgatttgcaaaattatgccgatattattagtcgtagtattgaaataaatggaaagataaatgctaaaaatctctctttaatgcaagggaataaccatattgatttcggcaaagggacagtaaatagcattaatggagaaggtgtaaaaccgaccgtcgctattgatacaaaagcattgggtggaatgtatgccaatcaaatacgcttagttagcacagaaaaaggggtcggtgttaatttaactgatattcaaacaaaacaaaatagtatcaatttaacagttgatggcaaaattacctttaatggcaatattcaatctgagcaagatattaatgttagtagcaaagcgctacaaatgaatagtaatgccagcttaaaagcgcaaagagatattacattagcaactaatacgctaacgaatcatagtgatattatcgcagaaaaggatatgcgtttattcgtagataaattcactaataaaggtgaaaaagcgcttattcaagcaaaagataatttatggatacaaaaaaatgcacagggtgaaccaagtagtttaattgaaaatcaatcagccaccataaaaacagaaaagggtgatttgattattagaaccaagaaattggttaatgaatctattactcctttatttaaagaaataaagcaagagcctgattctacatcgtctataaatataggtactcattttcttcatccttacaatagtcctacgaataatttccttataattattttacttgctgaattaaaagaactctctgataaaaagtggtttgatatattagatttaaaaaataatggaggtgttaatgtagaacgctcattatttgaaaagaataaaaagtatgttcctagtgttatttattctggtaaaaatttatatatacaatctaacgagttttttaatacccaatctgatatttttgcaactaatgatcttatcgcaacaggaaacaatgcaaaagtatactattatcggtttggacaccttaataaatgggatctttattctcatgataatgctcatattttttatcgagatgatgtaaataaatataatattgatgaaactaaatttcaaaaaatagttcattttattccctttactaaaactggaagtcattatgaatttattgtagatagtgcttctgaatatatgataaaagcaggtaataatttagttttagattttaaagatagtatagcgttagaacgtaaatttccatttttagaaaaagaaattaaaaagtatagaagaatatctgattttgaaagtactatattagctaaaaatatactattaaatgctaataatttaaatatctcattaaatttaaaatcaagtaactctttatctgttattgctaataaaaatataaatataagtaattcaaatttattatctggtgatattataaatttaacagcaattgataatgttaattctgaaaatatagatgtaacggcaaagcatttttccatcataactaagaatggagatattaattattcatttagccctatagcctcttatactctgaatagcattaaggcaccatttattgatgtgtctgaaaaaatagacttttattcaggtaaaaacatttacatttcaaatgtaataattaatgaatcaaatgaaaaaagtttatcagcattagagaatattaaaataaaacgcgatgagtctttatttttcaacctaatgccaaattttagagatgaacaatatatttcagcgtttttatttaatatggggttttggaaaagtaagaataatataagcttgatggctggtaaagatattgttagtcagggaataaaatattatagtaacaaagaaataacttttaatgcaggacaagatatttttcttgcctccaaattaataaaagaagccgctccttttttcagtgatatttattacccccaactacaatctaaattattttcagataataaccttattttaaatgccgcgcgtgatattgatttaagttcaacagtattaaattcaaaagataaagttattgtattagcgggtagaaatataaaactgggtgcaaatgcttattccgccatcgaagatccccacgaagatgcgcaagacattcaatatgccaccacatccattatgggaaataaaggtatttctattgcatcatcaggctcactcacaacagaaggaagttcacttaaatcagagggggatattgctatttccagtggtggcaatatccaattgggatcagtaagaacacattttcgtaaagagtcggactcagagttagaagaacttcgtaaacaagtcagtactgaaattaatagcggtaatcatctaacactattatctgagggcagtattttatttcaggcctctcaattggctgctaataaaaagatggatattgctgctaaaggtggatttctttatgcacaggcaatggaagaatccagttactatgaagaagaaaagaaaaaatgtaattggtggacactgtgtgcgactaaaaagaaatataccaaaacatttaataacacaacgaataaagttaccgagtttattgctaatgacgatattaatttaattgctaaagatgatatcactttagaagcaagcaaattagagacagcaaagaatgccaaattaaccagtaaaacaggaggcattaattttaaagcggtgaaagatactgcttttaaacaagttattactcgttcaaaagatatatatatcactcaacgtaatcagggatacaccaagggaacatggctattacctgaactctatattggcggaaagctgactatcgatgcgccaaaaggcatatctgcagatattaaagccaaaaaagagcaatctttagagcaggcattaactgccttaagtaacacaccagaatatgcttggcttaatgcgctccaaggtcaagaaaatattaattggaatttagtgaaagacacttattccagttgggatgataaaacccagcagttaaatccagttgttggtgcggttattgccatcgcggtaggggttgcaacttatggtacggcaacagctgcctcaataggaggaatggcaagtaatgccactattgctgcaggagcctctgcgggggttgcgtcaacggcatcagttgcggcacaagccggttttgcttctttagtttcgcaagctgcggtctctttagccgaaaatcaaggcaatatttctaaaacatttggcgccttaagtcgcagtgatacggtgaaatccattgtcaccagtatgaccgttgcaggcgccttgcaaggtcttgaccaatttatgggttgggatcaagcaatacaggggggaacattaccgacaacaggcaagttgcttgcgacggataatgccacatggactcaagttgctcaacgcgttgcctcacagtcagtagtgagttctacactgggcacagccattcaaggtggcagttttattgataattttaaaactgcgctattaagccatatcggcagtcaatttcacgctgaaggtgccaatctcattggtgataacggtgcgatattagggcatgcaggaaaggttttaagccattctgttgttgcaggagtgagtgctgaaattgcaggaggcagtgtaacaggtgcagtagccggcgccttggcagcagaaatagcggcaatatcgctacaaagtaaattatttgagcctagttatttaaatgaaactgacagacaagttgcattaattcaagaggcactacatggcaatgaaggaaaaacacagctcactaaattaattggtgcactgacaggcgctattgtgactcgtaagcctgagggcgtattttctgcggctaattctgcggagttagtttatcgacataattacagcgaacatatgctttcaaagctagcactagaaaataataaggacataattgcagcgtcaaaaggtgatgttgcagcagcagaaagagttgtaaatcgacaaaatgcagggatgattgcgattgctcttggtttaggaggaagtgcgagcattattggtggtcacactgttattgcagcaacaccagaacttattgctattacgcaagctgcatttagtacatgtaaagctaattgggtttattgtgctaatcagctaggtattaatatcgctgggatatcagctccagaagctgcaatcgctggtgtcaccgttggtactggttataaagtattagctagttcagaagaaagtgctaaagctttctctagcatgttagctaatagttcaaagtctttaatgacttcaggaaaattaaatataactgctataaaaccgatagtagaacaagaaaaattattaataactaccaacaaaaaagctattgaaataatcaataacggggagtttataatatattcaggagtaactacgaatggatataaagtatctaatggagccaaaaccgtagtttttaaaaatgaattagaacatcctattgttcaatctaggattaatattaaagtgggagatgttgaatcaggttggttgcatgtacaaaaacgtcatttttcaggagcgcaaaatgctagccaatttacgcttagtgaacaggaaattaaagatatattattaagtcctgctgtcattaagattcctattaataaaacgagagaatcatataataaaaacaccaatagtattgatattttgtatgaaagagtgattcagcttgataaaaatataggaattgataaatttagtaaacagccaactaacataattactatgctcacagataaaaatggaaatttaataactactacccctggggaaataaagtgatgacaaatgaagcttttttaaaatttaaggattcagaaaataaaattatcattccgtacctcaaaaaagtatttccatcattgaaatcagcatgttgtttatatcatatgatagaacaattagaggatgtttatacttacttaattaatagcaaggatgttatttttattgaagtgtcgaggttaaataattctattaaccatacggatattttatcaattaaagattatgctattatgaaaaaggggaaacaatatcatcgttatatgaaagagattattgctttatcaaatagtgagataattaaatgatagtttatggatggaatattagattaataaattatatataacaatacaattataacgttaaaaatccattgtattggcaaagtattaattgcatcaataaaaaaagcttttacacgttgtattagtcgaaaaaccatcacttaatataatttttaaaatatcaattaagtgatggtgttatttttactgaaaatccatcatgctaataattaacataatgtggcgataatcacctgatcggcattaaataacgctgttacggtatcattaatatgtagcttttgttgtgtaacatgctggttagaacaagtcgcacacacttctagtccaccttctaacgttaccactaattcactattttcattgcccgtttcaatttgggttagggtgcctgatagcgcattgtcatattgttgtgctacagaggcgcctttttctatattgacccatggcgctttaattaaaacgagtacttctttgccttctttaagatttagacgatcggcgcttttttcagttaacgccgcgcgaataaccgttttttgatcagcaagctgaacattaacatgttgttgtacttgtaagtgatcgcgttcaataatggtgccaaaaaattggtttctggcactggtctgtaacgaaaaacgtgaaatagccgctaaaaggctgtctaaaggtaatgaatcgtcttttaatacatcaaaggctttttgttgaatttgtcctagtagatcataaagttgtagtaagcgttcacaataatgagtcagtgtagcgcctccaccccctttaccgccagttgctctatcaaccaggagttcgtcagccagttgattcatttcattgatggcgtcccaagcacttttataactaatgcccgccattttcgccccttggctaattgagcctgttgctttaatttgttttaacagcgcaacacggcgtggatcagcaaagagcttatcttgaagtttcagtgtcagtaatatttctgcttgcataatgataggcttcttctggtttgtctgtttatcgcattttttgtgccgacacaaaacgataattctctagaatagatacaactatagcgttattattcgttattcgtgaagaaatgccaactctggctttccgaatataccatgataaagaggttatcatgtttgaattattgaaaagtttagggttcgctctcttgatggtacctgttgtgatggtacttatcatgggcattatttatggtttaggcgagatttttaacttaatttcacctagtcagtcaaaggctgataaaaaagcataattacccctctatttagaacagccctttattgtgaagggctgttttttaatactcctcaaatactcctcaaatactcgtcatacttcaagttgtagcgttgttgactgcgtttattcgcactagtcacatacttatgtatgctcctagcgactcattcacttgtcgcctagctacaccttgaattatttagagtatttagtatttagctatttaacttcaagttgtcgcgttgttgactgcgtttattcgcactagtcatatactgatatatgctcctagcgactcattcacttgtcgcctagctacaccttgaattatttagagtatttatcttttagctatttatcttttagctatttaacttcaagttgtcgcgttgttgactgcgttcattcgcactagtcacatactgatgtatgctcctagcgactcattcacttgtcgcctagctacaccttgaattatttagagtatttagctgttagctatttaacttcaagttgtagcgttgttgactgcgtttattcgcactagtcacatacttatgtatgctcctagcgactcattcacttgtcgcctagctacaccttgaattatttagagtatttatcttttagctatttatcttttagctatttaacttcaagttgtcgcgttgttgactgcgtttctatctccattgctatcgccatttttgtctccctatttatcgctatatttattgatatataaccaattttaatcaacttatcctttcattttacgttatatcttgatatatacagcgtggttattgtcctatttaagtggaactcaacatgaaaaaattatcaggtaagttactggctggtgcgattatctcttttgctttagtgagccaaagcatggcatcggaaaaaataacggtatttgcggcggcttctctcactaatgcgcttaatgaaatttcggcacaatataaacaggaaaaacaagcggatgtcgttgcttcttatgcatcctcttcaacacttgctcgccaaattgagcaaggagcacctgcaaatctatttatttctgccgatcagcagtggatggattatgttattaataagaatttaatggtgactgattcacgacatacattattaggtaacgacttagtgttaattgctcctaaagatagcaaattaaacaatgttgttattaataaggatactaaatggaaatccttacttaatggtggaaaattagctgtgggtgatccagatcatgtacctgttggtatctatgctaaagagtcattagaatatttaggtgcatgggatgtggtgagtccggaaatggcacgcactaataatgttcgcagcggcatggcattagttgaacgagatgaagcaccattaggtattgtctatggctctgatgctgttgccagtgacaaagtgaaagtggttggggtattcccaactgatagtcacaaacctgttgagtatccaatggcagttgtaaaaggacaggataataaagctgttcgtgatttttatgactatctaaaaacacctcaagccgcagaaatatttaagaaatacggctttagcccactttaggaattatacttttggagatgttaagtgaatacgaatggcaagcgattcttttaagccttaaggtatcgacaattgcagtaataattagtcttccttttggtatattgatggcttggctattagttagggttcgttttcccggtaaatcattgcttgatagcattattcatttacctttagttttacctcccgttgttgttggttatctattattaattagcatggggagacgcggatttattggtgaatggctatataattggtttggatttagttttaccttcagttggcgaggggcggcacttgcctcagctgttgtggcatttccactgatggtaagagcaattagactagcactagaagctgtcgaccaacgtatggaacaagcggcaagaacattaggcgcatcaccattacgtgtcttttttactataacgttaccattatctatgcccggcattattgcggggatcgtattggcctttgctcgctcattaggtgaatttggcgccacaatcactttcgtctccaatattccaggggaaaccagaacgatccctttggctatgtatacgttaattgaaacaccgggggcagaaatggatgccgcccgtttatgtgtcattgcaattattttggcgctcgtctctttaatggcttcagagtggctaactcgttgggggcgtaaaagattggggggcgtatgctagagatgaattttaaacagacactgggctctttgtgtctggaagtgaatactcaattaccaacagaaagtatcacggcggtatttggcttatctggcgcaggtaaaacgtcgctcattaatgtgattggtggtttaaccaaacctgattcaggacatattgtgttaaataatcacacattggtggatattgagaagaaaatttatctgccacccgaaaagcgcaaagtaggctatgtatttcaagatgcacgactatttcctcattataccgtaaaaggaaatttactttacggtatgtcaccaacaatgaaagtacagtttgatagaattatttatctattaggtatcgaacatctactttcgcgttttcctattacgctatctggtggtgaaaaacaacgtgtggctattggacgtgcattattaactgcacccgatattatgctaatggatgaaccattggcctctcttgatttaccccgcaagcgtgaattattaccctatttagaaaaactttcacaagatgtacaaatacctattttgtatgtgagccatagtctagatgagattattcgacttgctgataatgtgattgttatggatgccggaaaaattaaggcaatgggtaagttagaagatgtttgggccagtagcgcattacgcccttggttacaaaaagagacgttaagcagtgttgcaaatgttatggtcgttgaacatcatagccattatgcgatgacggcgaccgcctttggtaatcaagtactgtggttgccacaaatagaggcaaaaataggtcgcgatgtgcgcgttcgtattgatgcttcagatgtatcgttaactaccactcgcccatcaaatagtagtatccgtaatatattacatatgaaagtggtcgaaatgatcaaacatgatgatcaggtagatgtgaaactggttaatgatggcaattatttatgggcgcggatcaccccttgggcgagagatgaactcaatattcaagaagggcagtggctttatgcgcaaataaaaagtatttcactaagtcgccatctttaatttattgatttataaaaataaagcctcgtcatagatgaggctttgttgtttgaatagcaagtatttaagacaaaatatatttatgaatagtctctgcaataccgggctgattattatttttagtcaccagtttagcgcgtgctttgacctcatctgatgcgttgcccatagcaacacctaaaccaacatgctctaacatacttaagtcattgaagttatcaccaaacgccataacatcactcatcttcatgccattagcttcaacccaacgctgtaaacggcgacctttgctattacctttcttggcgatatcaacttgatcgacccaagaccattcacactctaagccgacttgttgttctacttgttcgattaaagcacgtaactcatcgtgattgggggttgtggtcgctattttccagatagaatcaacatgatgcattgcttggtaaaaatcatctactttgactaaattagggcgttgtgccagaggaagagtatcagcccaattaagtgtacgttgtacggcagcggtaagttgatcatacatcattgcatcatctgcatagactaaatgatgcacatcggtttgtttaaccaagtcgagtaccgcgcgtgtttcttcgggggttaaaggatcagattcaagcacttttttaccgaggtagtcgtaaagataagtaccattacaacagatagcgggtgtatcaagatctagcgcttgatagaatggatgaatagcaacatggtgacgacctgttacaatgagtactttaacgcccgcttttctggcaagattaagagcagttaaagatcccggtaggatacgtttttggtcatcaagcaatgtgccatcaagatccagtgcaataacgcggtacgacataataagccccttgatagtataaagatgcaatgatgctgatgttacacgttaacctagcaaagataaactagcttaatcgtgacaggtatcagttggttaagttattattctttataaatcaataggtaatcgattttaaggagaaaggatgaaacaggtagtctacgtagcaagtccagagagtcatcaaatccatgcgtatacattaaatagcgcgggagagatgcatctactgcaggttgttgaggttgcaggacaagttcaacctatggtggctagtgcagatggaaaacatctttatgttggcattcgtcctcattttagtgtggtgacctttgaaatcgcacctgatggccagttagaacaaaaagcaataacggcaattccaagtgcgccggttcatttgtgcttggataaaaccgaacgctttttgtttgttccttcttatcaccaaggtaacttagcggtattgccgattaatcaacaaggtattgctcaagcaccaatacaacttattgaaggattaaataaaccacactcttctaatattgattggcataacaagcagcttattgttccctgtttaggtgaagatcatattcgtctatttaatctttcagaagagggacatttaagtgaagcgcgtagcgaagagttaaccacagcaataaatgcagggccgcgtcatttagcgttcaatcctaatggcgaagtgttttattgccttaatgaattagatgcaacaatcaatgtttatcgtcgtatgggtgatctttatcgtttaatgcaaaccatcgatattgtgccagaaactttcaatagcacacgttgggccgctgatatccatattaccccagacggtcgtttcctctatgccagtgaacgttcggaaagcttgattagtgtaatggcagtttcagaagcaggggatcatctacaacctgtaggtcattatacaacacagacacaaccacgcggttttaatcttgataatacaggaaattatctcatttcttgcggtcagaaatctgattttgtctctgtttctcgtattgataggcaaaccggcgcattaacggaattagcttgttatccagtcggaaaaggggcgatgtgggtcactgtagtcaccaaataagtattgcttgctctctagcggtagatgatgccgctagagatattaaaacaaaataattaattggtaagattaactgctttctcaattgcttgagtgagtttagtgagcttttcaggtgatataatataaggaggcataatataaatcagttgaccaaaaggtcgtatccaaaccccttcatcgacaaagtatttctgtagtttagccatattgactggctcaaccatttctacgacaccaatagcaccaagtacccgcacatctttaacgctttttgcttgctttaagggtaacaattcggttttaagttgatcttcaatttgagcgacttgattaacccagtgaccttgctctaatagtgataaactagcattcgccaccgcacaggcaagaggattccccatataggtagggccatgcataaagcaacctgcatcaccttggctgatagtatcggcaatatggcgtgtagttaacgtggcggatagcgtcatataaccacctgttaatgctttacctacacacataatatcgggggagatccccgcgtgttcacaagcaaataatttaccggttctgccaaatccagtggcgatttcatcggcaattaataacacattaaattcatcacataacgctcgagcttgtgttaaatactctgggtggtatatgcgcataccaccagccccttggacgattggctctagcatcacagcggcaatatgttgatgatgttgcgctaatgtggtgcgtaaatcgtctatatcagtagcgtcccacggttgataaaatccggtttttggcgcttcgacaaacagatgattcggcaggtagcctttgtagagactatgcatcgaattgtcaggatcacacaccgacatcgcaccaaaagtatcaccatgataaccgcgttttaatgccacaatgcgctggcgtttttcaccttttgcctgccaatattgcaatgccatttttatcgccacttcaaccgctacagagcctgaatcagcgaggaaaatacactctagtggggcgggagtgatagccaatagttttcgacatagagcaaccgctgagggatgggtgataccaccaaacatcacatgggacattgctgctagttgttctgttaccgccgtattgagttcagggtggttatagccgtggatcgcagcccaccatgaagacataccatcaattaattgtttgccattcgctaaagtgagttcaaccccttttgcacttacgattggataagccggtaatgggttactcatcgaggtataagggtgccaaatatggcgtaaatcaaaagcaatatcatcgggtgtcattttactttccagttaataatgtaaacctagtgtgatcaattttagttgacatgataaccctattatttaaactggcaatcacttttgaacaggagaatgtattgtgagtacgttaaaacgttggacattaaaagaagctagggcactgtttgatatgccatttttagatttggtttttcaagcgcaacaagtgcatcgtcaacattttgatccttcacaaattcaagtcagcaccttactgtcgataaaaacaggcgcttgtcctgaagattgtaaatattgtgcccaaagtgcgcgctataaaacagggttagaaaaagagcgcttaatggaagtacaacaagtgattgaatcagccaaaaaagcaaaagcagctggttcaacccgtttttgtatgggcgcggcttggcgtaatccacatgagcgtgatatgccttatcttgagcagatggtcaaagaagtgaaagcgctaggtatggaaacctgtatgacattgggtaagcttgatgattcacaagcctcacgcttagcacaagccggactggatttttataaccataatcttgatacatcacctgagttttacggcagcattattaccacccggacatatcaagaccgtttagataccttagataaagtacgtaatgctggcattaaagtgtgctctggaggcattttaggtttaggggaagaggtcaaagatagagccgctatgttagtgcaattagctaacttaccgcaaccgccggaaagtgtacctatcaatatgttagccaaaattaaaggtacgccactggctgataatgaagatgtcgatccctttgattttattcggactattgctgttgctcgtattatgatgcctcgctcttatgtgcgactttcagcagggcgtgaacaaatgagtgaacaaacgcaagcattctgttttatggctggcgcaaactccattttttatggttgcaaattattaacgaccacgaatcccactgaagataaagatcaccaattattccgtaagcttggtttaaatcctgaaagattatctgtctcaatgggcgatcagcaacaagaagacgtgttgctacaagctgttgctgaaaaagacaccgaacaattttataacgcggcactgtaatgagttggcaaaactatctagataagcgacttaatgagcgtagaaatacgccattatggcgaaaaagacaggtgatccagcatagcaatggacgctatttaaccacactgtctggtgataaatatgttaatttttctggtaacgattatttagggataagccaacatcctgatgttattcaagcatggcaacgtggtgcgaatgaatatggtgtagggagtgggggatcgggtcatattaccggttttacacaggcccatcagcagttagagcaacaactcgctgactggttagggtacgatcatgcgctattattttcttcaggttatagtgctaatcaaggtgttattgcgacattacttgaaaaagaagatgccatcattgccgataaactttgtcatgcttcattaatggaagcggctatcttatcaccggcgagtttatggcgctttttgcataattctgcgccatctctatctcagcggcttcataaaacctctgcgaataaaagcttagtcgtgacagaaggggtttttagcatggatggtgataaagcgccattagcggctatggcagaaataagtcaacagcatcaggcgtggttaatggttgatgatgcgcatggtattggcgtgttaggtaaagaaggtaaagggagttgccatgaagcagggattaaacctgagttattaatagcgacttttggtaaagcctttggcattagtggtgcggctgtactgtgtaataaggcgactgctgagtttttcgaacaatattcacgtcacttaatttatagtacctcaatgccccccgcacaagccgttgctttacatgcagcgttaaaagttattaaacaagatgatgaaggacgagaatatcttcaacaacttattagctttttccgtcaaggtgtctcatcacttccagtcacattattaccttcacaaacagccattcaaccgttaattattggtgatgaactacgctgtcaacaactttcagactatttacaacgtgaaggtttctgggtaaaagcgatctttccaccgactgtaccccctcacagcgcacgtttacgcattactttaacgactcgtcaccaaatttccgacattgcgatgttaatcgagcttcttcatggtttcttcaatcaaaacagataaacagcagatagcccagtgttttagtaaagcggctagccattatgatcatcatgcctctattcaacgttatagtggtgataaattgatgtatttagctcgccaccaagctggggatagggtgctagatgcggggtgtggcactgggtatttcagtcaaaaatggcgacaacaaggacgatttgttatcgcacttgatttatctcatgccatgttacaagtggcgagacaacaacaacgggctaattgttatttacaaagtgatattgagcactgtgcgatcaccccccacagcatagatatcgtttttagcaatttagctatgcagtggtgtgatgatcttgccattgcggtaaatagcttaatgagtgtcgtcaatccacaaggggcgctctatttttctacgttagcaacatcaacgttacaagaggtacgagatgcttggcagtttcttgataaccaccaacatgttaacccgttcctctcttaccaacagattgaacaagcctgtagtggttttcaatatcaatttgtgactgaaaaggtgacagaacaatatgcatcattgcctgagctttttacctcattaaaaggggtaggcgcgaattttgtgcaaggagaacggccaaaaggattaatgacacgccaaaaactgcgtcaattagagcaagtttggcgcaaaacagactctggtaaatatttacttacttatgaactcgttataggaaagatttctcatggctaaaacatggtttttaacaggaacagataccgaagtcggtaaaaccgtcgtaagtagtgcattattacaatgcgctacacaacaaggatatcaaacggcgggttataaacctgttgcatctggcagcgaatggttacctgaaggtttacgtaatagtgatgcattaacgttacaacagtttagtagcgtccctttggcttatcagcaagtgaatccctattgctttgaaacccccacatcacctcatattgtgagcgaagaaacaaaacaacctattgattttcaggttatgtccaaggggttatcttatctgcaacaacgcgcagattgggtattagttgaaggtgctgggggatggtttacgccactatcagcaaaccaattctttgcagattgggtgattgaagaaaaattaccggttattttaacggtgggtattaaattaggttgtattaatcatgcattattaacgcaacaagctatttggcaatcagggttgactttagcgggttgggtagcaaatgaagtagagcctgccgggcggtatcaacagcagtatttagctactttaatggcgcatattaaagcaccacttttaggtaaaattccttatttaacacaagacgttaaacaacataattttacctcttatcttgatctctcttatctcaaatcacattgatacatcatcattgagtcaattttaacagcttattttcatgtataaaaaaataaaaaaattattttttttgctaaatattagggttatttttaataagaaaaaaagctgtaacctaccgtggtataagcactttgttcagttatccactattcctgtggataaccttgtgtattaccataataaaaatacgccaaatatagagaatacaaggcattgctaaagattggtgttattctcaacttttattttttattgtttattattaataagttaaataaaatcaatagtgcgaaagcgtcaactcactctcagtgatttatccctaaaataaggggttgattttttaaaaaactttttgattaaaatctggggataacttaaatccgttattcagattattttttgtaagatagagattgaagctggatttttatccagtatcataaggagtgtctgcgaggagataagaatatgagcaaagtttttaaactgcattcagaatttaaacccggtggtgatcaacctactgctatcgcttcattatgtgaagggttagaagatggacttgctcaccaaaccttattaggggtaaccggatcaggtaaaaccttcactattgccaatgtgatagctaacctaaatcgtcctactatggtattagcgccaaacaaaacgctagctgcacagctttatagtgaaatgaaagagtttttccctgaaaatgcggtggaatactttgtctcttattatgactactatcaacctgaagcctatgtgccaagctccgatacctttattgaaaaagacgcctctgttaacgaacatattgaacaaatgcgtctatcggctacaaaggctctcttagagcgtaaagacgttattgtggtctcttcagtttcagctatttatggtttgggtgatcctgatagctatttaaaaatgatgctacatttaagcaatggcatgattattgaccaacgtgcgattttacgccgacttgctgatttgcaatatacccgcaatgatcaggcttttcagcgcggtactttccgagtccgtggtgaagtgatcgatatctttcctgctgaatctgatgactacgctttacgtgttgaattatttgatgaagaggttgagcgtttatcgctatttgatcctctcacagggcaaattcattacaatgtgccacgtttcaccgtctatcctaaaacccactatgttacgccgcgcgagcgtattctggatgcgatggaaaaaatcaaacaggagctagctgaaagacgtaaggtgctattagccaatgacaaattggttgaagagcagcgagttacccagcgtactcaatttgatttagaaatgatgaatgaattggggtattgctcaggtattgaaaactactcccgctatctttctggccgtgggcctggtgagccaccaccaacgctatttgattatttgcctgctgatgggttattagtgattgacgaatcacacgtcactattccgcaaattggcggcatgtataaaggcgaccgctcacgtaaagagacgttagtggaatatggcttccggttgccttctgcgttggataaccgaccattgcgttttgaagagtttgaagcattagcaccacaaaccatttatgtctcagcaacaccgggcaaatatgagctagaaaaatcaggtaatgacattgtagaacaggtggttagacctacaggcttacttgatccggtggttgaagttcgccctgttgccacacaggttgatgatttattatcagaaatacgtatacgagcagctaaaaatgaacgtgtattagtgacaacattaacaaaacgtatggcggaagatctgaccgaatatcttgaagagcatggtgaacgggtacgttatttgcactcagatattgataccgtcgagcgggttgaaattatccgagatttacgtctaggtgaatttgatgtgctggtggggataaacttacttcgtgaagggttagatatgcccgaagtctctcttgtggcgattttagatgcagataaagagggattcttacgttcagaacgttcgcttattcagacgattggtcgtgctgctcgtaaccttgaaggtaaagctattttatatggcgataaaataacagattctatggcgaaagccattggtgagacagaacgtcgtcgggaaaaacagcaacaatttaaccttgaacatggcattgtgccaaaaggcttgaataagaaaattggtgatattcttaagattggtcaaccgactcaaggccgtaataagaaaggacataaagcggttgatactcatgaagattatccattactttctacggctgaattagaaaaagaaattcagcgcttagaaacggaaatgtatcaacatgctaaagatcttgaatttgaaaaagcggctcaaacacgggataaattacaaactttgcgtgcgcaatttattgctaattcttaataagaacatttaagtagattagcttacagggggcgttataacgtttataacgctcttttttgttatttctttatcactttttatttattttgttattcccttcctggcaatcaactgtttaaatattacaactaacaaacagtcaatgatttacaaagataaaaaagacattaaggatagtgaatgagtggttatgtgtatgcagggtttccaagctctgtaggagtcattattggtgtttttttcctcgtggtactttttaagtggttacgcaactttgccgtgcaagacaataaattatcaacctctgcaatgccagcaacaactgatccagagtctgcgttatctactccaacaacggaaggttcagtaaatcagctattacctaatgaatggggattatatgttgcagccccttatgctgtcatgaatgaatgggcatataacgaatataatcaaggtaaagatgatggtgggctatcagcggcttggggagttaatgatcggtgggatttaatctaccaattattttggttgctgactcaaggtcataccaatgacttttaccagttacgtgaccagattttgaatggcaaagaagaagatattcaatcattaaaaaacgatattttattatctgatttaactgaaaatgataaaaatgaacgtttatggcaaatcgatatgatgaacaccaatcgaatgaatatccaaaatgtaaaatatcttatttgggatctttgtcgttttaacaagctttgcttagaaggctgccaacaaggttatattacccagcaagaagcacaaacatggtcattaatgagtgcatcaatgctacgtcgtatttatgatggttgggaagatatgtggcaaaactttattgctactcgttggttatgggcaagtggtgatcaaaattgggcatcatcacatcaaacattttccgatgtcgtacaaaatatactcaaagcagaaaataccttagcgacagaagaaaactgggtaatggagctacccccattagatttaatgtcttttacacgagccgtagctggattaggttttatgaaaaatgatgtgcctatgacactggctgaaatagaagaaatgatcagcgaacgcattactttaaaaacacttaatagctaattgtctatttgtaaaacaaaattacacagttaaagtaagaaaataatctaataaagactaattaaccgcactgagatagataatgattttagtgcggttttttgattggtataacgattaactcgctgtacaagcggtattacgttgacctaattgctgaagtgttaattcaatagctttacttaataggtgcctatcatgacggtaaggaatatctttcgcctctaattgcgcttgaacaattaatcgtcctttcattgattcatattgtgtttctggactaataatcacagcatcaatagtttgtaagccaatataggtttccatcatggcgattttatctgacatcgtcatacttgcagccgcagggctaagctctttacctaaattaccaatataaatagtagtggcactgctacgacgtaatgctttagctaaatcaggtagcaacaataaaggcatcaaactggtaaaaaaactgcccgggccaattaaaattaaatcagcttgctcaatggcttcaatggcttctcgtgtggtggtgacgtctggatagagttttaattgacgaggcatcctcggtaaattatctacattgacctcgccatagatttcatttccttcatcatcaatggccattaaatcaaccgcttgttctgacataggaataagatgagcattgactctaagtagaccgcggataagattaattgcttctaatgggcgaacgcttaagttatctaaggcctttagcataagattacctaagttgtgtccagcaagctctcccgtgcctgagaaacggtattcaaacatcgcagaagcaacggaaggctctgtgattaattgattaatacaattgcgcatatctccccacgcgataccgccttcgtctttacgaatacgtcccgtggagccaccattatctgttgtcgtgacaatccccgtaaggcgagttcctaaataggagagtgctgaaagcacacgtccaaggccatgacctccaccaagggctacaacacgatctaaatcacttagcgtgcgatttcgcataattgtcttactcacttttaaaaatttgccgctaatttatcacaattataatttaagcctatgatcacggcgtgatttcatcacattcttaatcttgaatgagtatcgattgctggttatttagacaaataaaagggaagagtaagggggagtgtaaatagaataaaaataaaaaaagtgttgtaagtcgttgtattataaattatataacgaaaacaatattcgctttttattaaataaacaggtaaaatccacacataaaatattggtataagaacctgttaaaaacaggtaaagattaactcctagccttaacatctaagtcaacaagctttatccaaaggatatgatgttctggccgtgactaactaagtcaccagggtgcacggtagaaatgcccgcatctcccgaatttggaaaggtgttattatgcaacaacttgttgatgcgttttcccgcaaatttttctatttacgtctatcaatcacagacgtgtgtaatttccgttgcacttactgcttacctaatggctacaagccaaatggtcataagtcctttctatcactggatgaaatccgccgactgactcactcttttgctgaattaggcacagaaaaaatccgtttaacgggtggtgagcctacgatgcgtcgagattttaccgatattatcgcgactattaatgaaaaccctgccattaaaaagattgctgtgacaacgaacggctatcgtttagcccgtgatgttgcacaatggcgtgatgcggggctaagtgcgataaatgtcagtgttgatagcttagatccccgccaatttcatgccattaccgggcaagataaattccatcaagtgatggaaggaatagacgctgcttttacggcaggttatgacaaagtgaaagtcaatgttgtgctaatgcgcaacgtaaatgataaaaacttgcctgattttctccattggatcaaagacagaccgatacaactacgctttattgaactaatggaaactggtgatggtagtgatgtttttaatcgctttcatttatctggtgaagtgatccgccaacgtttacttaacgaaggttggctacaaattcctcgcgcccgtagtgatgggccagctcaagtctttactcatcctgattatcaaggtgaaattggtcttatcatgccttatgaaaaagacttttgtgtcacctgtaaccgtttacgtgtttctgcgattggtaatcttcatctttgcttatttggcgaaaatggtattcctttacgcgatttattggctgatgatgcacaacaacaagccctacaacagcgtattcagggtggacttcttcataaaagagaaacacattttcttcatcagggcgatagtggtattacccctaatctttctgtgattggtggataagttttttcgctctgttatttagttaatttcaggagttgtgcatgtctcaactaactcatattaatgctgccggtgaagcgcatatggtggatgttagcgccaaagctgaaaccgtacgtgaagcgcgagcagaagcctttgttgaaatgtcagcagaaaccttagcaatgataaccgaaggtcgacaccataagggagatgtctttgctaccgcacgtattgcgggtattcaagcagccaaaagaacatgggaattaattcctttatgtcacccattgctgttaaccaaagttgaagtccatttagaagcccttacagactcaaatcgtgtgcgtattgaatcagtgtgtcgcttaacgggtaaaacgggtgttgaaatggaagcactcactgccgcatcagtagccgcattgactatctatgatatgtgcaaagcagtacaaaaagatatggtcataggatctgtgcgtttattagaaaaaaccggtggtaaatcgggacactttaaggtggatgcatgattaaggttctttttttcgcccaagtgcgtgaattagtgggtgttgattcactggaattacaaaatgattatccaacagtggatgatttacgccgtgctttaattaacaaaggcgatcgttgggcattagcgcttgaagatggcaaattgttatccgcagtaaatcaatcctttgttcaaggcacttatgccattaaagacggtgatgaagtggcttttttcccacctgtaacagggggctaagatgagtacattgacccgtatatcagtccaaaacgaacattttaatgttggtgatgaatatcaatggttgtcagagtgtgaaagtgatggtgcggtcgtcacttttacaggaaaagtgcgtaatcataatttaggtgatgaagttaatacgctaactctagagcattatcctggtatgacagaaaaggcgttaaatgacattgttgagcaagcacgcgcgcgttggcctttacaaagagtcagcgtcatccaccgtgttggccaattaaatattggtgaagagatcgtgtttgttggtgtgaccagcgcacatcgccatagtgcttttgaatccgcagaatttattatggattttttaaaaacgcgcgcgcctttttggaaaaaagaggggctatcagctaaccaagatagatgggttgatgctcgccaaagtgactatgattcagctaagcgttgggaataattcatcaagtgaaatcaaagacaacatcactttacttaaatttattttacggtgacattctatacagtttatttcgtggaaatgtaacattagtgtgataaaattaatcactaatgagtccataatgggctctttactgaaataaacgttatcgttaaattcaacgttatcactatgattaaagggtaatcatcatggatcgattttcacgttcaaatgattcaatcgtacagcgcactggtacaggtctacaaacctttatggcgcaagtgtatggctggatgactgtaggtctgttacttactgcatttgttgctctgtatgttgcatccagcgcgactttaattgagatgatcttcactaataagatctttttctttggtttgattatcgctcaattagcattagtttttatattatccggtatggtacataaaatgagtggtgcgcttgccacaaccctctttatgctctattccgcattaacaggtgtcactatttcgagtgtgttaattgtttatacttactcctctgttgctagcactttctttatctgtgcggcaatgtttggtgcattaagtgtttatggttacaccactaaacgtagtttaactgggatgggtagcttcctgtttatggggcttatcggtattatcattgcttctattgttaatatctttatgcaaagcagcatgatgagcatggttatctcttacgcaggtgtactgattttcgctggtttaaccgcatatgacacacaaaaattaaaggatatgggtagcgaaattaatcaagaagataaagaaaatatgcgccgttactcaattatgggtgcattaacgctttatttagattttatcaacctgttcttaatgttactgcgtattttaggcgatcgtcgttaatcataaactgcgtcgtttaataaccgcatagttaaatcccataacctcttcagttatgggattttttgtatttataaaatacgggcagcaagtcgttatttatagcgtgagatgtttattcttatctatcaaggtacagattttatactatcttcctgcagaaaagataataggcaatagagcctgtcccaatagcaataacaatcagtgcccataaactatgccatattacggtaatatcggcatttttgaggtagatttgtttggtaatatcagtgaaatgacggattgggtttatccatgtggcttgctgtaaccaaactggcatattttccactggagaaatatagcctgataataatactgcgggcatcataaatacgaacacaccaataaatgcttgttgttgtgttgaacttaacgcggaaatcaaaagcccaaaacctaccagcgataaaccgtaaataagcatggtaaagtaaaataatagcagtgagcctgaaaaaggtatttgatagccgaaaataccgataattaatacaatggttccctgtactgccgcaacaaccatggcaggaaccgcttttcctacaaagatttgccaagttgataacggtgaaactaatagctgatctaatgtcccttgctctcgctctctagcaacagacagtgatgttactatcattactccgatggtgataattaaggccactaaagaaggcacaataaaccatttatagtttaaattggggttataccaattacgtactactaattcgcttttattcagtaaagatggggtatcgccggctaattctgtttgataattttgcacaatttgttgtacataatttgccgcaatttgtgcactattagaattacgtccatcaagaattaattgtaattttaccggagtatgactggctaaattagcactaaaattttgtggaaaacgcaccaatagcaaggctttacgattattaatcgtctctttaatttcatgttcactttttaataatagggtttcagaaaaagcactggctttggctatgcgttgggttaattcaatagattgtttaccattgtcttcatcaaaaatagcaacagaggcattggtaacatcaagggtggcagcaaaagggaataagatcatctgaaagataaccggtaatattaagataatccgtgtttgcggctcttgtaataatgactgtagctctttcattatcagggtgagaagacgatgaaacataaaaactctcccttattaatctaagcgacgacgtgttgctaacgccgttaagccaataaaaaagatggctgaaacaattaatagccacatatctagcattaagatcatcggaatatctcccgctaagaagagtgtctgtaagctactaacaaaataacgtgcgggaataaaataggtcactacttgaataaaaaatggcatgctatcaatttcaaacacaaagcctgataacatcaccgcaggtaaaaaagccgcattaagtgagatcattgccgcgttaaattgattgcgagttagggtggagatcaatagccccatacctagtgcagtggctaaaaatagtgaagtaatacccgctaaaatccataatgagccacggtaaggcacgcctaatatatagacagtgaccaacatacatagcaccataacaaaactgcctaatacttgataaggaataagcttggaaagcagtaattctgtgcgtgtaatttgggttgagagtaaggcttccatggtgccacgctcccattctcgagcgataaccaaagaggttagaatagccccaaccacggtgatgataatagtgacggcaccgggaataatatagtgttggctgatggcggcagggttaaaccaataccttggctcaatttcaattaatggttgctgctgaatgccttgacttaaagcttgttgctgtaaccagatttgccaaacccctttggtataggcttgtacaaagtttgcggtatttggctcactaccatcggtgatcacttgaatgggagctttgctatcttgtcgggctaataattgcgcaaagtcgacaggaataaccacaatgccacgaatttctccggcttgcattttatcgataagcaattggcgattatcgctgatggtggcgttaatatagggagagttggtaaaagtatacactaactcttgtgccggttggctttgttggttagttaatataccaatatttaatttgcttgaatctaagttgataccgtaaccgaaaataaacagtaaggtgagggggataacaatagcaataagcgcgctactgggatcacgggtgatttgtttagtctcttttaaacaaagagcatataaacgtcgccaagaaaaatgtgcaggtgatgattgagacgaattactcatgtttttcgctcccttggtgattttcttgttcaagttttttatcgtaatccagtactaagccaataaaagcatcttccatagagggggtcggattttcttctgttgctaccatctgttttaatgaatccggctcgcctgctgcaataatttttccgcgataaaccaaaccgatacgatcacaatattcagcttcatccataaagtgagtcgttaccatcactgttacacctttatccaccattccattgatatgaagccagaattcacggcgtgttaaaggatcaacccctgaggtaggttcatcaagaaaaagaatatctggctcatgcatcaaggagcatgcaagggcaagacgctgtttatagccaagaggtaaggtatcggtgatttggttaatcattggctgtaagccaaatgcggttatcatatcattgattttattgcgctgttgcttaccatataatccataaaccccagaaaaaaatttcaggttttgccccacttttaagttgctatatagcgagaatttttgtgccatataacctaaatgttggcgagctttacctgagctgactttcagatccatacctaacactaatgctttaccactcgttggtactaatagcccgcacatcatcttaaaggttgtcgattttcccgcaccgttagggcctaataacccgaaaatctccccacgtttaacttggaaatcaacatgatcagtggcggcaaattgaccgaacattttcgttaattgttgagcttcaataacggtttcatcgggtgctggggggatttgtggcatgatctccgccagttcagatttatgagaagggccaccacctaataaatcaataaaggcatcttcaaagcgcggtgtcgccgggataagttttgcatctggttttcctaaggcgtttaacaatgctgtttggtcactgtgtttttttaagatcaatcgtacagattgcccttggatcacgccatcggtcacttgaggttgtataatggcttgttgcaatacttttcgacgctgatgaccttcaacattgagtaaaaaagagcgtcccgccattttagccgttaaggtctgaggtacaccgctataaagtaattcacctttattcagtagcagaatatttttacattgttctgcttcatcaagataagaggtactccataagataagcatgccatcaccggctaaggtatgaaccatttgccaaagctctcgacgggcaatgggatcaacaccaacccccggctcatctaataacaggactttgggactacctaatagagtacaagctaaccctaatttttgtttcatcccaccagaaagattacccgctagacgagaggtaaaacgtgttaagtcagtaaaagagagtagctgttgataaactctttttctctcttcaccgataacattttttaaatctgcataaaggttgagattctctagcacagtgagatcttcatataagccaaatttttgtggcatataaccgaggatagccctaacatcaacactctgtttttgcggatccattcctaaaattttgatctcaccagcatcaggttttagtaatcctgctagcatgcggattagggttgtttttcccgcaccatcagggccgacaagacctgtgactgaaccaccggtaatggtggcggtgagtgaagcaaccgccggtttttcaagcccaacaaagcgtttttcaacaccgcttaaattgatggtgtaatttgtgttatccatattgattgcctctcctcaacttaatgagtcggtgcaaatttcaaggtcactggcattccttggcgtaatgaatcatcagcatcggtgacaaccactcttatacgataaactagatcagtgcgtagttccggtgtttcaacgcttttaggggtaaattcagcggttggcgaaacaaaacctatagtgccatgataaggcttatctttgcgactatcggtataaagatacacctcgcgattaggtatcgcttcacctaaatgattttcactaatataagctctaacccacacagggttagttaaagaaacagtaaaaacagggcttcctgctgataaaatagtgccaggctccacagcacgagtcagtatagttccttctgcaggtgaggttaattgggtgtcttgaagattaagctctgcttgggcaactgccgctttggcttgaagtacttgacctcttgccatatcaatatcttcttggcgataaccattttgatattgattgagtttgtcttgtgctgcttttaatgccgcagccgcttggttacgattattgcgggcactgtctaagtcattagctgaaataactttgcgattagcaagatcttgttgtcgcttataaaagttttcagcatattgccatgcggcacgttttaatgacacatctgactgggcttgtgcaatttcttcactgcggtaaccagcctccattaaggctaatgaagcgatggcactatcacgttcaccataagctttatttaatgcattaatgtaaggtgcatcatcgagttggcctaataattgacccttggtgaccggcgcaccttcatcaacttgtagttccgctaacttgcctgcaacacgaaaacttaagttaaccgtccgaatatcaacatttccatagagtactaactcaggatctttgttctcttcataataatagatacctgcgataataccgataataatcattaagataataaagacactgatttttttcgttttcataataactctatttatatttatgcatggttgttatgagtatagatctctcttagtccatcaagtagtaaagtaatatgtacttttaaggtattagaaataatttcatattcctgtttaccaattctatcccatccagtttggcgtaaaatggtttctcgtactaatcgaaatgatagcacctctcccaaaatagcgtgagtatgtagcatggtttttggtaaagttggatctaagccaatataaagtgctaataaacgatttacacgagttaatagcggagataacgcttgctggtggataagggaataggcttctgtgggaacaagttgttctcttgccataatgcgactgatatgtacattgcttttatcaagtacgagtcgggcatattgcaaaaaactgtcaatgatcagtttttgtaataggggtaagtgctctgttggattaggtttttcaagaaaatcatcaagttgtgcaacggtgggttcaaaatcaattcgaattaaatcggcaatatactgtgcaacagcgagatataacccttctttagagccaaaatagtaagcaatagccgcgatattttgcttcgcagcttgcgcaatctggcgagttgtggcgctatcaggcccatttttaccaaagatttcacaggcagcttctaataactgtcgttttgcaagttcccctcgagttttcttttggtgtgtgtctggcataaggataccttacttaagtaaaatgtaacaaagaaataacattaaaatagtcgttattgaaagtagtatattcgatgatattgagtaacaggataaatttgtagtaaataatgaaataaagatgacatgtaataaaaaaaacatgatttatttaaaaattatttttatattcgcaagatagcaaaactgttaaaatgaccgctattaggttaacctgataaggttcattctctttcaccttgcggtgaaagcccgtcatttttaatttcaatcaccgtgttatgcgttctggttgtaggagatttctgttttgaccgattttacatcgcttggtttaagtgaggcgcttctccgcgctattgatgaacaagggtataaaaccccaacccctattcaacaacaggcgattgagccgattttggcgggtaaggacgtattagcaagtgcacaaacgggtacgggaaaaacggccgcatttacattaccgatactggaaaaactcgctacatcagcagagaaaacgaaagggcgtaagccagttaaagcgcttattttaacccctacacgtgaattagctgcacaaattgccgataacgtaaaagcttatagtcgttatttacctattcgttcattggtggtttttggtggcgtcagtatcaatcctcaaatgatgaaactacgaggtggcgtcgatgttttgattgcaacaccaggccgcttacttgatcttgaacatcaaaatgctgtcgacttatctcgcgttgaagtattggtgttagatgaagctgatcgtatgttagatatgggatttattcatgatattcgtcgagtcatcaataagttaccgaaaaaacgacaaaatttactcttttcagcgactttttcaaaagagataacagggcttgctaactcactactcaacaatcctataagtattgctgttgcccccaaaaactcagcggctgaatctgttgatcaatatgtccatttagtggataaaaagcgtaagacagagctgttatcacacttaattggcctagaaaattggcctcaagttcttatttttactcgaactaaacatggtgcgaataaattagctgaacatcttaatttagatggcatcaaatcagcggcgatccacggtaataaaagccaaggagctagaacacgtgctctagctgattttaaagacggtaaattaaaagcgttagttgccactgatattgcagcgcggggacttgatattgaccaacttccttatgtggtcaactttgaattaccgcaggtagcagaagattatgttcatcgtattggtcgaacagggcgtgcggcggcaacaggtaaagcgatatctttagtttgtgttgatgaacatggcttattagccgatattgaacgcttattaaaacgtgaaatccctcgtttagcattagaaggttacgatcctgatccctcaataaaagcggcgcctttgcataaaaagccaaagaataaagcacgtaataataaagaaggcggacatggtcgtgctgatattcgtggcaaagataatcgccatacaccacgtaataaaaatagtcgtaatcaaaaagagagtgaaacgggtgagataaaacagaataaatctaaaccagctagacgttcacgcaaacacgatgatgatcgtgataatcaaaatccttggtcaaaagctagaaaagaattttgaggctaaactgtgcgagtcctattagcgccaatggagggggtgttagacccccttgtgagagatctactgacggcgattaatcattacgatctctgtatcacggaatttattcgcgttgttgattcattattaccgccaaaagcattttatcgtttatgccctgaattacacacccaaagccgcacgcaaagtggcactttggtgcgggtacaattattagggcaaaatccacaatggttggcagaaaacgcttttcgagccgtctctttaggttcatggggggttgatcttaattgtggttgtccttctaaaaccgtcaatggtaatggtggtggtgcctcgttattaaaacaaccagaaacgatttatcaagcaactaaagcgatgcgtggtgctgtacctgcggatttacctgtttctgtaaaggtacgattagggtgggattgttcatcttattgccatgaaattgccgatgctgtagaacaaggtggcgcgacagaaattactatccacggtagaacaaaagaagatggttatcgtgctgataagataaactggcaagcgattggtgaaattcgccaaaaattgactattcccgttatcgctaacggtgagatttggtgtcgagaagatgctatctcttgtttaaagataaccggctgtgatgcgattatgataggtcgcggggcgatgcatacgcccaatttaagtaatgtgataaaaggtattgaagaaaaaatgccttggtcacaagtgatccaattacttaaacgctatattcgtctagaaaagcaaggggataccacttattaccatgcttcccgtataaaacagtggttgggatatttaagaaaagagtatcaagatgctgatgcactttttagtcaaattagaacgctaaaaacctcacctgaaatagccaaaataatagaagcgttataataaccacaataggttattaatagccaaaaccagcattaataataaggtgctggttttttctataaaaaggtaaaaatatctgaatatgaaaaaaataattgctgtttaagtacaattattggaaaaaatcactatttcgtcttacactcttaaagtgaccatttttaatatactatctatattatcactacatttagggggaactatgggatttctttcttggattgtgttcggtcttattgcgggtatcttagccaaattcttaatgcctggctcgtatgatatcggccttatctggacctgtattctaggtattgtgggtgctgtagttggtggtgtaattagtaatttctttggtaaaggcaaagtagatggtttcaattttggtagttttgtcgttgccgtaataggggcaatcgttgtgctttatttagcaaaaatatttgccagttaattggaaataaagagtctattaatactattaaacccgcatctgcgggtttacttttttgtgctaacttcactatcgcttttattttattcgcattcacaaggtaatgcgttttctgctccccactgcgcccaagagccatcatacagtgcgatattctggcagcccaatagagttaaagctaaaaatagaatagccgcagtcatacctgagccacaactgacaataattggctgagataaatcgactcccgcttgttcaaatatgtgctgtaattgcgctttatcttttaattgtccattaatgactaagctatcccaaggaacatttttactattgggaatatggcccctacgtaaaccgggacgaggctctggtgctctaccataaaatctatccgccgaacgagcatcaatgatttgattttgttgcgtagtcagattatccagtatttgttgtttatcgacacggcgttgagtgttgcgtgtgacgataaaagggtgagtggttgggacgttgggcgtttttccttgctcaagggggaaccccgcttcctgccaagcttgtaaaccaccggccagaatacgcaccttgtgacaacctaaggtagtaaaagtccaccagccacgaggtgctgaaaagagattaccgatatcatagaggatcactgttgtattatttgaaatacctaactgagttaaggtttcagaaaacagtgtgtcagatggcaacatatgtggtaatgatgttgttttatcggcgatttcatccagatcaaaaaaatgggcaccagggatatgacgttcaagatagcgctgatgatagtcaatatcttgcgtaggcataggcgcgctaacatcaactatcaccagatcttgatcgtcgtgatgttcaaaaagccattgtggggtaacaaaataatcaaattccatggtgcaacctctttatttcgtcgatggtgagctatctggtagagctggaaattgctgtgctggtgagcgattaggttgagtctgctctgtgtctaccggtgtggttgagcgcgtataaatatttagtccggcaagaaaaacgcctccaagggagccaaaagccagtagtgcgataacaacaagaagtaattttttcataagatttatgtgcagatgaatgttactaaaaagtatatctagatatgccattgaaacaagtgctgtaccacataaagcagtaaattggttagtattaaaataggatatcgctgttcaaaaaacaaacaaatttggaatataataatacctagttttaattatggtgatagttattgtttagggtgatggataataacaaaaagcccttaaactcaggagtcaccgagtttaaggggaagggaatacaacttattattttatttgatacacaatcggtgctgtaaattatgtgtataaaaaccagaatgtcatcgctaagttaacggtagcggcgatagccattggaattgcggttcttttcactatttggaaaggtgagacattggcaattcctgcaatagcaacaatagctgccgtaataggtgaaactgtgcgaccaaagctggtcataatttgcataggtaaaattaaagtgatgacatcgacttttaagaacgcagcaattttgggtgttaatgcggcaaatgaaaagaatgcagcattacccgatcccattaaaaaggctgctaatgctaagatggcactcatcacaataatcatcgcagcaataccaaagccagcatcttgagcagaactaattaaggtatctaccgcgccactttttagtaatccattagcaaaaaattccccagatacaatcaacgatacaactaaaacaaactgttttcccatgccttcaaagaataacataaaactgttcattaccgctttagcatcgcgcaatcgcacatattcaaagactagtgcaataaccgtactaataatcattgcggtagtcacttctaatttaatgtaattatgaaataacggactaaaaccaataatgagaattaaagggatcacgggtaataaggcatatgataatggcacctgacttccttcttcttttacattatcaatagctgttgggtcgaaaacaaaaccctcacgtttatcccaccaacgttgaataaagaaatgggtaatagcaaccgcaatgataataggaatagtgatagggagttggtgttgaacaaaatagactgcaggttcaatatccgctgttttagccgccataataacatttccagagccgggtccatgatcaataaattgacaacaaccgataacagctaaagcagatagaggactaatacctgagcgaattaaaatagggtacatcgttaccatgagtaacattcctaaacctgcatggctaggaataaaaataactaaaatttgtgtgactaaaaatgaaataaccagtaataagtagggggatttaatcgtttttaatggtttttcaaaaatagcaaataaagctcggctggcgcccacgtgttccatataacgtgagaaaccagcaattgccattaaggttaaacctaaacccgctaaacgcgagctcataatatcggtaaaaatttggaaaatatcaaaatacttaaattgtgtagatttattttccggtaataaagggttgagatcgagagaagctgtaaggagcaataacagcatgcctccgagtaataacacaggttgaggtttataacctcgagccagcaaataaactaccaacgcagtaactagcgcggcaataattaaaccagtcataattaattccccagtgtcgtgatgcagtattgttgttattgatttaatgcactaaatgcttgggtgagatctgcaattaagtcatcagtagactcaagaccaatatgtaaacgtacaaaaggaccgtggccttcacgccaatctgttgctgttctggcacccataacattggcgggtaatgcaagactttcaaatcctccccaagatgcaccaataccaaataaggttaatgcatcaataaattgttcagattgtttaatggtatatttttgtttaaattcaatggttaataatccattactacctttacaatcacgtttccataagtcatggcgaggatgtgtgggtaactctggaaaccaaactttggccacttcagggcgtgtttctaaccactgagcgatagccagtgctgatttaccatgatttgtaagacgttgagcaagagtcctcattcctctcaggactaaggcggcatcatcagggctacttgcttgaccaagagcttctggtaatgccccaatttgtttccatgcggtttcatttgcgatcataatgcccatcatgacatctgagtgaccgcataaatatttagttgcagcaattacagaaacatcagcacctaattccaaagggttataaagccatgccgagccccaagtattatccaccccaacaggaatatttttttcatgagcgatatggcaaatttctggtagatccagcatttcataaagtaatgaacccggtgattcaacgaaaataagttgagtgttttcttgaattttttgctcgaaatctgaaccgtcagttttaaaaaagctataagtgatattattaggctctaaaaaagcagaggctattttacgtacgggttcatagacagaatcagcaaataaaacatgcccaccacttcgggcgtagcccataatagtaaatgcaattgcggctagccctgtaggaaagagctgtgctcgataaccaccttctaattcagttactaatgcttcaagtgcaaacgctgtttctgtaccacgagcaccatagcttaatactcgttcagtaatacgacgatcgcgtatttcacgccagctttttattgaatcaaaaacaatagtactggctctcataacaggagggttaattgggccagatgttttaattgcttgacgcccactatgtatcaatgttgtttgtttattctgtttcactatttatatctccgaatatagaaaataagatctcccagtaattaatttagaatttaattactattttgagctggaaatttgtagttgctattatttataacaaagatatttatttttaaaatatctatttttaaaaaatgatgatcttgctctaattttttatcattaattattctaattaaatcttaaagattgtttaagatttaaaaggtataaataataaattaattttattttgcaacttattgaattttaattaattttcaattgattagaaattctttaaattagattaaaattatcaaagtgtttttattaaaattctattgcataaataaagtaacaagctaacaactcgttttattttaaaaacgattttttattattcttttaacaggggaaataattatgggaactagtgtgtttgattctgttttattaaaaaacttatggtcaacagaagaaatgagaactattttttctgacaaaactagaatgcaaaattggcttgattatgaagcagcattagcaatagaacaagctgagcttggtttaattcctcaaaaggcggcggaggttattgtacagagtgcaaaacttgaaaaattagatatggattatgtattagaacaagttcgtcttactcgacatccattagtacctactattcgaggcttagaacatgcttgttctgaacattatggagaatatgttcattttgggccgacaacacaagatgttattgatacaggcttagtgctacaacttaaagctgctcatcaaacttttttacgtgatattaaaatattaggtcgttcattactttctttaagtgaaaaacaccgcaatacacctatggttggacgcactttagcgttacaagcgttaccaatcacatttgggcataaaacagcaatttggttgacagagttagcgcgtcattatcaacgacttaaagaggtggaacctcgtctatttgttggcagtgtagtcggtgctgtcgggactaaagcttctttaagcgataaagctgatgaattagaaaaacgcgtattaaaacgcttaggattagatataccggaaatctcatggcaaccagcacgtgatagatttagtgaatatggtatgttaattggattaattagtggaacgttagggaaaatagctaacgagatcttaatattagcacacaatgaaattgatgagctttcagagccttttggtaaagggcaagttggctcttcaactatgccacataaacgcaatccagctattgttgaaaatgccgcctgtgtaagtaataccttaaaagctaatctttctgtattaacggatatgatgaaacatcaacatgaacgtgatggtgctatctggaagatggagtggaagattatgccagaaatgtgtctgatgttatctgttatcttggataatatgaaaacagtactaggtgggctaaatgttcatgttgaaaaaatgcgtcacaacatggatatcttaggtgggtttatgttagcagaacgtgtgatgtttgctctgtccgataaagcaggcaaacaaactgctcacgaaattgtgtatgaagcgtcaatgtctggacaagaagaggggattactttcgtagaagctattaatcgtgatactcgtattcgtgaccatatttcacaagaagagttaaatgctttgctagatccaactacctatgttggtaatgctcctgagcaagttgatcgtgtagtcgctcaaacaaaagcttccggctggttaaatgattaattgatggaatgaaatctcataaaaagccagtgataactggctttgttattatcagcattgaggtatttatatgacattgagtcagcatgtagctaattttattactacaacgacattttcacagcttccaacgcaactgatagctcgagccaaattacatttattagatacattaggtgtagcacttgcagggagtacacaatctagctcgaaacaaggacgtcatgggattactcttttacccgatagccaaggtaagatccccatttggggaagtatgcagacagctaataccactgcagcagccttagccaatggtattgctgcacatgcattagatttcgatgatacacatactgattctattactcacggtagtgctgtattaacaccgatagcttttgcgttaggggaaacattaaacgcctcaaatgaagaaatattaacggcttgggttattggttgggaagttgctgcacgggttggtttagcgagtcacagtggtttccatcaacgtggatttcatgcaacggcgattgctgggatcttcggtgcaacagcatgtgcggcttcattattaaaacttacgtcacagcaggcggtaaatgcgttaggactaacggcaagtcaagcagcgggtatcgctgaatatctgactaatagctcatcggcaaaatgttttcatgccggatgggccgctcaatccggtattattgcagcctcgttagctaaagggggaatgactgggcctgagacaatatttgaagggcgatacagtatttatcatactcatgggatcagtgagcaagcgatccctgaacaagttgcacaaggattaggtgaacaatgggagtttttaaatgtttcaataaaaccttatccggtttgccattttgctcatgctactgttgattgtggacgtcgtttacttaaaagagggatcagtgcggaagaaattgaacaagtagaatgtgtgattgatccagttgctgctgcattaatttgtgagccactcgaaacaaaatgggcgccaaaaacagcttatggggcaaaatttagcttaccttggttatttgctattggttttttagataatgcgttaactttatcatcgctttcagcggaaaacttacagcgtaacgatatccaactattggcgaaaaaagtgagctatcgttatccatcagaaaatgaaattccctttccgagctattttcctggattaatctttgttagattgaaaaatgggcaacaattaactgaaaggatcgatattcagtatggtaaccctgaaaatccgatggttgatacggatgtaatagcgaagttttatgataatgccaagtgtgtaatgaaaaagacacaagctgatcaactgattgaaaatataatgaattttgaaaatatacctatttcattacttacacaattattacgggtagaggcataactcttttatctgcatccacagggacaagataatgaatctgataccttttgtttaaatgagttgcacctgataaatggcactgacaatttattgtagtgccatttttgtttccttaatgagttagtggttttgaagggtaatatctgcgtgattaatgacttcattctgctcattttttaatgaatcaaatagtatctgagctgctttactcgggctattggcattaagataaaggttataacgaatagcaggtaatggcggtaatccctctttttcacccaaaatacgtaaatcatcatcagaaagctcgatagagcgtgccattatacctaaaccagcacgaacggccgctctggcaccagataaggtggtggcaatataggcaatgcgccagcgaatattttgttgatcaaggtgatttatcatcatatcacggtaagtacttggttcatcaagaaccactaaaggtaacggttcgtcaagatcaaatctaaaatgtttaccgcaataccataacgaaggcgatacgcgtaagacaattttagggtaaccgacatgctcttctgtagaaatggctaaatcgacctcattattttccaacattgacattaaaaaagggctacgtttaacaataatctccataattaaacgaggataagcacctgaaaaacgagcaagtagatcgggtaagattgtgtttgctgtatcatcgggagagccaatctttaatattccatcaatttcttcatgcaataaagataaacatgcttcatcattaatgcgcaaaatccgccgagcataattaagcagttgagtgcctgcttcggttaatgttttatttctcccttgtcgagcaaaaagctctttacctattaatgactcaaggcgttgcatttgttggctgactgcagattgtgttcggcaaactgattcagcggctgcggcaaaggtggaaccatcggcaacagcaacaaaagttctgagtaggtctaactctaaattaaaaatagggcgctttgcagaagtcattttattatctcttaattggtgttgtggtgcgaaataaaacgcaagaggtattatttttataaaggttaataaagttctttttaattggcataccgctctctttcatactatgaagagttggatcaataatctataacaccgctcaataaattcgtagggttacgcagtatttgatgaaaaaggcgagtaagtgcagctgactactgatttttatacagtattatgcgacaataacgcttattttaatgacaaatagagtagttatgtccctttctcaatctgtaaaaatgcaaatcagccaatggtataaagcattacctgagcatattgaaggctttattccacgagcgcctcagcgcgaaatgattgctgaagttgcgaagacattttctgatgaaacggggcgacatctaattattgaagcgcctaccggagtaggtaaaacactctcttatcttattcctggtattgctatcagtcgggaagagaaaaaaccactgattatcagtacggcgaatgtggcgctacaagatcaaatttacagcaaagatctgcctttactaaaaaaaattattccagacctgacttttactggggcttttgggcgaggtcgttatttatgtccccgtaatttagaggcaatttgtgcaacagaaggtgagcaaattgatttaatgttcttgctggaagataaagttgatgtcgcaaccagtgcggaaagggagatttgccaagagttaaagcacgattttaccagctttggttgggatggtttgcgtgatcaccataaacgagcattaacggatagtttatggcgcaagattagcacagataaaatgaattgcttaggtcgtaattgccaatactatcatcgctgtcctttttttctggcccgtcgagaaatagacgaagttgatgtggttatcaccaatcatgctcttgtgatggctgcgatggaaagtgaatcggtgttacctgatgcaaaaaatattttattagtattggatgaagggcatcatattcctgatgttgctagagatgcgcttgaagttgaaggggaaataaccttatcggcattaaatatgcaacttgataatatgactcgtcatgtcagccaatatttagcacaatttatcccagtcaaaccacccaaattagccgatcccattcgttttgatgctcatattgcaaaaatgcgcgaagcctatcaagacgttgaacattttacccgcgcgttattgcctgagcgcagtgaaaatgatgaatatttatttccattaggtcaattacctgaacaattactgttatgttgccaagacttatttaagctaaccgatggtttaaaaatgttaggtgagtcgattcttaacgacttaactgagcgaacagcaaaagaagatgttgtacgtttacatcgcgcgattttaaccactagccgaatggttggttatctggaaaatatggcaaaactatggcgacttgcgacattagagcagacatcaaaagcacccgtttcgaaatggcttactcgtcgttatgataaaaagcagtcacatctctatttacattgtgctggtattcgcgttagtgaacagttaacacaattattatggaaaaatattcctcatgtggtgatcacttctgccacactacgttcattaaacagtttttcgcgtattcaagagcttacaggactaagcgaacactttgatgatcgttttattaccttgtcatcgccttttacacatgaaaggcaagggaaactcgttatccctaaaatgcgttatgaaccgacaatggcgaatgaaaaagcgcatttaaaagagatggcacgctattttcgtcaaggaatggtagaaaaccaccatcgagggcaattagtattatttagtagtcaacgggcgatggaaggttttttagaggaagttaaagatctacgtttgagtctcttagtccaaggagatcaaccgcgctatcgtttagtggagacacattgtaagcgtattgatgcgggcgataatagtgtgttaattgggctacaatcttttgctgaagggttagatttaaaaggtgactatttaacgcaagtacatattcataaaattgcttttccacctgttactgatccggtcattgtgacggaaggggaatggctaaaatcactgaaacgttatccttttgaagtgcaaagtttaccaagtgcatcatttaatttgatccagcaagttgggcgtcttattcgtagtcatcattgtcatggtgaagttgttatttatgatagacgtttattaacgaaaaactacggctcacggctattaaccgcgctacctgtctttcctatttatcagccagatatacctaaaacagaataataaaaaggctacctatattggtagcccttttcagtaagaagcatgtgattaagtaagcaattagttttcaatatttgcttcaataaaccataagaatttatctagatcacgggatgctgcggtaaacatatcagcagtatcttcatcttcaacttcatcaatcgctttacgaatatcattagcgactaccgcatagcgatcagccaatgctttaaggtgatcttgcacatcatgaatatcgagtggataggcttttaaaggtgtttttttactgacagtttgtggtgtaccaaggactgtgccacctaattgtactaaacgctcagcaaactcatcagtatgttcattgatggtatcacggaaaccatctaccatttcgtgtacggcaataaagtttctaccgcgcatattccagtgtgcttgtttggtaatgagagacaaatcgataaactgagtcaccatttgctgcagtagttcgatagtatgcagtttaacactgtcatcaacattattacgggtataaagcagggctgaaggtgtggatttgactaatttagcagtactcataatcgttctccctaaataattaataactcaatatcttaatttctgttaattatgatagtggattattaatggttagtcttatcgcttgctactattaaattgatagggcattactaataaaaatgtcatctatcgaaatagcctatttagaataagacaatatgcttaaaatagcaatgttagggaagtaaagttattatttaataagtaaaaagagatcaactgatctcttttcatttaatattttatttattaataagttaaactgtataaatatttattctactttttcaattttggtttttcttttcatggttgcagtggaaccaatcgacgctaacacaataaatgccaacgcaacccattgtattaacgttaaatgttcatgtaagaaaataataccaataaaagcccccatacaaggctctaaactcatcaatgtcccaaaggtttttgccggtaaacgggtaagtgcaatcatttccaaagtataaggaaaagcggtagataaaatcgcaatagctaatccaataggtaatatagaccaactaaaaactagctcagggctactttgtagcataccaatagggaaaaagataaaggcggcaataagtgagccaatagaaactgtcgctgcgccatagccttttcctgcacgttgtccgaaaacaatatacagtgcccaaccgacacccgcacctaatgcatataaaatgcctaggggatcgagtccgtgaatattatccccaatcggcagtaataaccctaatccagcaatcactaagattatccataaaaaatcgattgctctgcgtgaagaaaacatcgctaccgcaagcggtcccgtaaactcaagtgctactgcaatacctaatggaatagtttcaagagccaagtagaataagtagttcattgcccctaatgataaaccatataaaaatagtggcattatggcactacgagaaaagcttagacgccatggtttaaaaataaaaaacaggatcagagtacctagaaaaaggcgtaatgctgtgactgcgggggcgccaataacaggaaacaggctttttgccaatgatgcgccactttgtattgatagcatagaaagaagcaaaagaagcacagggtagaacacctgtaatttagctgagtgtctggctgacaacatcctgaaaaacctcgtcaaaagtaaagcgttgagtactctgttatcctatataacaaaggatcacataatataaagtaaatttgtgatttttaatatagttatttattaattatttattaataacacaacttaaattattttagtttagggatagtttaataatattaaaatatatttggaaaatacagtaaggatgaataaaaacaatcaaattaaatgtgtattattaataaaacaaacagagagatatattataaaagcgataaaataattttttttgaccttttttataactgaggggttcagtataatttttcactcgttttaactagctaaagagaattaaaaatgaataaaataaagtctattgccgtgtattgtggttcaagtttaggcgcttcaccaatttataaacaacaagcgattctttttgctaaagagctggttaaacgtaatatcactttagtttatggtggtgccagtgtaggaattatgggcacgctcgcggataccgttttacaggaagggggtaaagttattggtgtgatcccaacgctattagaagggcgtgaaatctcacataaaaatctgacagaactccatgtcgttgaaactatgcaccaacgtaaaagtaaaatgattgaactcgcggacggctttgtggcactgccggggggttttggcacattagaagagttcagtgaagtgtttacttggagccaaataggccttcatcaaaagccattaggtatatttaatattaatgatttttatcagccattactggctatgatagataaaatggtagatgaaaaattcttacatgaaaaatatcgtcatatggcgattgttgagcaatcacctatccagttattagataaatttgaaagttatattgccccttcgattaaaacctacgataaataaaggtagagcatgataaccataagaaaagctgtactttctgatgttgagcagattaataccctgtatggctatttatttgctgagatggcgaaattacagccagaaagattaaaaccgggtaaacaagatgaagcatttattattaatggcattaaaaatgataaatttcatctgttagtggctgagttagaacagaaaattgtcggttttactattgcccaaatacaagagacaccgctatttaactgtttagtacagcgtaaatatgcctatatttttgatattgttgttgacccttctgttcgtggacaaggggcaggggcattgttgctaaatgccatgaaggcgtgggctaaacaacaaaaaatgacccacctagagctttcagtattggctgaaaatgccgatgctaaacgtttttatcagcgagaagggttaaaagaagtcagtaccgtgatgggtattgctttgtaattttcgcttaatcatggcaaaaataaacccgctgagtgcgggtttattaattatgttattcagctaaattgtgggtttccccgcaattatcgtacacaataccctgacattttcaatatcttctgccgatatttcaaacaagtttctatctaagacaataaaatcggcgaatttccctacttctaatgaaccaatctgtttatccatatctagtgcataagcggcattaatggtggcggctcgtaatacttcgattaaggtgagattgcgatcattatctaaacgtggctgagagggatctttttgtcgagtcatggcaactttaaagtcataccactcatttaatggatcaatcggccaatcactgccaaatgcgacagtcactcccgcatcaataaatttaccggcggtttctagatattggcaacgtgctttgcctaacatttcaagatctttatcaatattatgttgctctacgccagcccattgaaaggagagaaaagggtaggtatttaattgggcaaagcgcgcataatctttttcacacattaattcgttatgcgcaaggccggggcgaatatctttttctggcaaggctttgcgcatttcactaatggcgtcaagtgcgacactaatagccccttcagcgacggtatgaatatgaggatgataacctgcacggctaatctcagtgactaatggcgtcaagatttcaggtgaaaaatagagatcgccaacatgctctgaatcttgccaatgaggcgtttcatccgtaccgacattaatacgataaggagcgtgtaaacgtgctgtcataatcggcgcttgtaatacaccatcaagaaaaagcttaatatggcgaatagcgacactgggttgcgcgccttgactgatttgatgccagtgagagaatcgtgttattgcttgttgtacagcatgaggaatagctgcaatatcagccacatcatcaggggtaatttcaaccgcattctcaacacgaaccgttaattcacccgcttctcgcaaggtattaaaggcacgtaattgtggctcaccaacacgtgcatccatgatagtcgttaccccttgttgattgagcaacttttgtacatggcgtgcgatttgtagattttgctctgccgttaaaggcggtaggctatcaatagcctgcatagctggcgcatcttcaagaataccaataggtgttctatcaccatcacgttcaatattgccatcaggtggatcgggggtttcagccgtaatatttaataattctagtgcgcgggaatttgctaatacgctatgacaatcactagaaaaaagtaagatagggcgagacgtatttaagctatcaaggtgataacgcgtcatttgtatcccttccggttgcatcccttcacgataccatgctgacactttcaaccaagctgtatcactatcgatgggatcagcatcaagatagcgttggatacgcgatagaatttcatcgattgttaaggagaggtaatcaaggtgacaacctgctaatgtggctcccccccaaaatggatgcatatgagcatcaataatgccgggcatcaccattttcttctgtaaatcgatatgctgtgttttttcattacagtaagcaagtaaattcgattttgtgcctgttgcaataataatgccttgggaaacagcgatagcttcgacgaaattgttactattatcagcggtatagattaggccgttataatagagtgtgtctgcaatttgaaatgtcattcttctaccttgtatagcttttttggcgatgatggctaattttcggtactgattgggcatcctatgaagttttgatgcgggcggtcatattagaattaaatgacgctcaatactacctgcgtgttacattgatttaactaactgttttatcaacgggcgaaaataataggataaaccgtatagaataccactatatggaagagaataaggtaagcagaaccgatagctacttaccctattaaaatattagaaggggtcaattatcgggcaaattagccgcacatacatcacagtgtggatttttaggtagcttaaattcacgaaattgcatccgcatagcgtcaaaaattaatactttgccatgtaaagtttcgccataaccagtgagtaatttgatggcttcaatggcctgtaaagtgccaatagtacccacaacaggggccataatacccgcttcaacacaagtgagtgcattatcaccaaaaagatgacttaaacagcgatagcaaggttcatcatcttgataggtaaagacgctaatttggccttccatacgaattgctgcaccagatactaagggttttttctgcacaaaacacagtcgatttagttgttcgcggatagtgacattatctgtgcaatccattaccagatgatgttggctgattaattcagccagtgctttatcttcaagtagtgcatcaaccgtatctatctgtacatggggattaatcgcgtttaatgttgttttagctgataaaactttcggctgaccaatggtgctatcgcgatgcaggatctggcgttgaagattggacagtgaaacggtatcaaaatctaatagtgtcagtttgccaacacctgcggcagtgagatattgcgatacactacagcctaatcccccaacaccgacaatcaatacagaagcacttttcagtgcttcttgaccgtcaaaatcaaagcctcttaacacaatttggcgattataacgcagcgtttcttcatcggttaattctatactcataaacactattcgctttttagcagaggattaaatagctcaatagtgacggtttcacccgctacaactttaccacgctctcgctctaagacgataaaacagtttgcaacactaaaggagctatatacgtgagagccttgatgtcccgacgttgttacttgccattcaccattttcattaatactggcgataccgcgttggaaatccagacgaccggcagatttttttaatggtgaacaggttttagcatggaaacgctgtggtgctcgccactgactaaaaccagataaacgggcaattaaaggctgtactaattggtagaatgtcactgttgctgagacaggattacccggtaatccgcagaaccaagcattatgtaagcgaccaaaagcaaaaggtttacctggcttaatggctaatttccaaaaaccaatttcgcctatttcatctaaaatttgtttagtatagtccgcttcacccacagaaactccgccactgctaatcactaaatccgcttgtgcatcagcggttttaaaagtttctcgcagtttttctggcgaatctggaataacgcctaaatcaagcacatcacaatctaatttttccaacattaagcgtacggcaaagcggttagtatcatagatttgccccgcttttaatggttggccaatagtttgcaactcatcacccgttgaaaatacggccacttttaatttgcggtaaacattaatattggcaataccgagtgaagcaataagaggtaactgtgctgtagaaagttttgttcctgcggctaagacgatatcgttttgttttatatcctcaccaatacgacgaatattttgtccaagcttggccggatgtggaaaaagaataccgttgtcagtcacttgtgtttcttcttgcataataacggtatcgacacctgcgggtatcatggctccggtcatgatacgaacacattgtccttgtggtaattcaccttcaaaagggactccagcaaacgctttgcctgcaataggtaaaggagattgagtgtttagatccgtataacgtacaccgtaaccatccatggcagaattatcgaaaggaggtacattgagtggtgaagtgatgtgctcacttaagatataacctgctgccttatgcaaagggatactaagggtatctgtgattgccaccggtttttcaagtaatttttctagcgcctcatcaagggataacaaaccgctaacctgacattgactcattgtatactccaaaatctatcgaaatgtgctgttttatttcatgatactaatctatcacgatgaagcacatcatgttagcgatcatctcatcagcaaaaaaagaaaatattactcaacacaaaatgttaactatttaaaacaaaactgttagttaatgtgttaataatattgttgtattttaaatgtaataaataacatcaatacaatggagccttatgaatacctcaacccacccaagccattcagcacaagcctttcatatcgcttttagtggtttccttgctttagttgttgctatggggatagggcgttttacttttacgcctcaagtaccgctaatgattgcggacacacaactgacattaaccagtgccagtattgttgctgcatttaattatctaggatatttagctggttcatatgatgcgatgaaagcaactaaaggtgtgggctatcggctttgggggggattatggggagcggtgatcattacactgcttagtgcggtacttaatgatgctttaactcatagtattgcccgtttttttattggttgggcaagcggttggacattagtgcttgttgcttcgtgggcaaatgaagtattagcccgtttaaatcgcccggcattaagtgtggcagtctatgcaggaacaggggcggggatctttattagtggccttcttgcggtattcattctcaagtggcagatgagtgcgacaacaggttggttgatttacggtgtgttggcatttatttgtgcaatttatgtgagctatcatttacccaagccttggtcaattaatcgtgagcaagtcaaagtagagccacttatcttaacgccggcgatgaaaaaattgatttggggttatacctttgcgggctttggttatattttacctgcgacctttttatctcaaatggcgacagaacgttttcccggtagcttagtagctcaatttgtctggcctatttttggtgcttccgcagctttatgtattgggatcgcgatactgacacgtaatgtccttaatacacaattacgattggcgataacactatggttgcaagcactggggatcatcattgccgaatggctacccacaattacaggtcttgctattggcgcatttttagtggggggagggttaatgtgtgcggtgcaattggcatttttacgtggtaaagagttggcacctgatcatgctcgttatatggcaggattattaacaacattttatgctattggacagctagttgggcctctggtttccttcctttcaacggcgttaacgggaagactagagccggcattatatgtcgcctttgtgatattgatcatcggcggtattttggtttgtatgaaagaaaacaataaagggtaaaacaataaaaaatgacaaaaaagcaataatttcataaccaaaaatgcagtattgctggataatgtgattcagctcatctaaagtgtaacggttatcgttgaattaggtaacagagacttaattaatgtgtttatcggagagtccaatgtcatcaacattaagtaaagaggcgcaatgggtacatgccgcgttagtggagcgtggtttggaaacgcctcttcgtgagccaaaactttcacccagtgagagtaaacaacaaattaaacatcacatgacggaagtgatgaaattgttaaacctagatttgagtgatgacagtttagcggaaacgccacatcgcattgcgaaaatgtatgttgatgaaattttttcaggcttggattatcacaactttcctaaaatcaccctgattgaaaataaaatgcaggttgatgaaatggtcactgttcgtgacatcacattaaccagtacttgtgagcaccattttgtcactattgatggtaaagcaacggttgcttatattcctaaagataaagtgattggtttatcaaaaattaaccgtattgtgcagttcttcgcacaacgccctcaagtgcaagagcgtttaacgcaacaaatattgattgccttacaaacgctattggggacgaaaaacgttgctgtctctattgatgccgttcactattgtgtaaaagcaagaggcattcgtgatgcaaccagtgcaaccaccacaacttcattaggtggactatttaaatctagccaaaatactcgccaagagtttttgcgtgctgtacgccatctttgagatgaataaatggaacaaagttcacgtcaacgcatcgacgctttagatgcgttgagaggaatagcgatccttggcatcttattactcaatatctcaggttttgccttattaagagttgcctcatttaatcctatgcattcaggagaggcgacttttgtggacaaacttacttggatggggctaaatttatttacccaaggaaagtttctgtttatttttgcgctgttatttggcggaacactttatttattatcacagcgctctgttgcttggaacgtctctcgcctaattattctggcattaatcggtattattcataccctattactatgggaaggggatatcttatttccttatagtatttgcggattatttgttctcttttttattaaagcattacctattaagcggcaatttatccttgggctgctgctctatttatttggcgcgattattttagcttttttattttattactatcgtgattttgttgaaatagtttggtatagctctgactattccgccatgatagagactaattggaaaaccggaaactatataaatagtatctactggcgattagatgaactgagtgattttatttttaatttagttcgtcaatatagttggtttttaattggcgccatgttaatgggggcggcgttaatggcatccggttggttacaacgacgctattcacagtctcattatggtttgatagcggtttgttttttagtcataagtttacttttccaagggacgcttgtaattaccgattattatttagattggcattatatgtggtctgcggtagtggctcagcctatcaccatggtgatccaaattattcaaagcttaggttatattgctttactctattgggcatggccttatattcaacacagttttatcgcctatgctttacgttgtgtgggaaaaatggcgcttaccacctatttactacagagtattattggcacgacgcttttccagcggatggggttatttaaccaatttaccttattgcagcttatgctatttgtgatggctatttgggtgataaatattatctttgccgtaacgtggttacgctatttttctcaagggccaatcgagtggctgtggcgccactcgtcaacagggttatcaaaacgcttttaactgtttttgccattgtttaatggcaaagcttctacctcttgtggtgaaaccgccggatagcccttaatatcatcaggaatattttgtacagcaggtatggcttctggtggacctagaaaacgcggttcacgttttaatatatagagatcgacaaccgcacctgctctggctaaaacttcacgtacacgcaccttaaacatactcttcggcgaagcaacagcaaaacactgagcatcaatgcctttttcaagggcaataaatacggctcgttcgcaatggaaacgctgagtgataatagtaaagccatctgtcccaaacacttcttttgtgcgtactaccgaatctaaagttctaaatccagcaaaatccataacgatacgcgatgccggtatgcctgctttaattaaatctttacgcatcgtattgggttcattatagctatgctgtgcattatctccactgagtaacagatattgcactttgccgctgttataggcgttaacagcaccttgaatacgatattgataaaattggttaagatagcctgtggtgtaatatttagcagtacctaataccatgcctacttttttggcgggtagtttatctatatcttcaaatatataggggctagtttttacacctatccagcgatcacaagcaattaatgccaccgcaactaagataaaaagggtcaaaaagagataaatgaggcgctttagcatatccttgccttaatgactcagggttttctaataggttaaaggctacttgagcactaattgggaagcaagaaaaaagcgcgctattagtgataatagtgcgcttttcagaatgaaacctaatgattttaactcaattagaatgacgttctcttgtaaatacggtattcaggctcccaatagttacgttcaatcgcttcttctaaagcagaatcagacgtgaccgttgcaacaccttgcacctgtgcttctttggcaacttgtttagcaatataacgtgaaacttgttgaatatcggctaataaaggtaatagtgggccatcgccttcttttgccataggcgagcaatcggctaacgcacggcttgcaaccattaacatggcatcagtaacacgctttgcaccacttgcaataacgccaaggccaatacctgggaagatgtatgagttattgcattgtgcaataggatacactttttctttataggtgactggggcaaatggacttcctgtagcaacaagagcttgtccatcagtccaattaataatatcttcaggacgcgcttcaacacgagacgttgggttcgaaagaggcatcacggtaggacgttcacaatgcttatgcatttcacgaataatctcttcagtgaaaagtcctgcttgaccagaaacgccaatcagaatggttggcttagcatttttaaccacttctaacagtgaaattgcatccgtttctgtttgccaatcggccagcgtttcgcttttttgaataagcttgctttggaaatcgagtaagtttggcagtttatccgttaacaaaccaaaacggtcaaccataaagatacgtgcacgagcttgttcgtcgcttagtccttcagacttcatttgtgcaataatttgctctgcaataccacaaccggctgagcctgcacctaagaaagcgacagtttgatcttttaattgacgccccgcagcacgacttgccgcaattagactacctaatgtcacagcggcagtaccttgaatatcatcattaaagcaacataattcatcacgataacgatttaataacggcatggcatttttttgtgcaaaatcttcaaattgcagcagtacatttggccaacgacgtttaacggcttgaataaattcatcgacaaattcgttatattcatctccggtaatacgtgggtggcgccagcccatataaagtgggtcatttaaacgttgtggattattggtgccaacatccagtacaacgggtaaggtataagcggggcttattccaccacaagcggtatataaagagagtttaccaataggaatacccataccaccgataccttggtcacctaaaccaaggatacgctcaccatctgtgaccacaatcacttttacgttttgtttggtggcgttttgtagcatatcatcaatattggcgcggttagggtaagagataaaaagtccacgcgcacggcggtaaatatcagagaagtgctcacaagcttcacctactgtgggggtataaatgatgggcatcatttcagtaaggtgagattccaacagacgataaaatagcgtttcattggtatcttggatatttcttaaatagatgtgtttatcgttatcatttttaaaatcaagatattgacggtaagcgcgttccacctgctcttcaatggtttctactgcctcaggcagtaaaccatgaaggttaaaggtgctgcgctcttcttcgctaaaagcactacctttatttaacaggggaaattcaagcaggattgggcctgcatacgggatatagagaggacgtttactttcgtgttccagttccatgaaaaatactcttgtaaggcagttagtcacatgacaagtgtagatcctacaaaataataaaaatatgtacagcttatgttatttttttatgatttttctgcttagaaatgagagatagatacaattgttatgactttttctgataagcatcagcaaaaatttacatgctgatgcttttttatgaggacaatttaacggtataagttaaaaaatgttacaaagtgacacgctgtatttggcggcaacctaaagctgttaatgttgcttgtgtggcatcccactgagttaataggctgtctgctttttcaattaatattgcagactcaatatccataacattttcacccgccatatttaatgcaataagtgccgcttgtaatggtggcatactaggattgaatgcggcattttcagcataactgccttgaaagatcttaccgcttttcatctgtacagcaataccactgtgagaatggctgtaaggggcatgactacgatttattgcttgtagtgcctgttgtgccagttggctagtgttatctatttgataaccgtgattaactttatccatcagtagggtagtgatattgagatctttagggccaaagctatcaggtaagtagtcacctaaggttgccacttttcggcctgggagatggattgcaatatgagtgccgctatttagttcgttcataaactgacgacaatgaccacaaggggtatagttaactgtgatggcaactaaacgagactcaccgcgtaaccaagcatgtgtaaccgcactttgctctgcgtgtaccgtttgttgtaatggggcgccagcaaactccatatttgccccaaaatagaagtgaccgctttcaccacgagcaatggcacccacattaaaatgagagataggtgtcacagcacaagcggctgcaacaggcagtaatgcgagggctaactcatcatcattacattgtaactgtgtttttaacgcattaacttgttctgcagtgaacattgccggaaattcatcctgctcaagataaggcgtaagtgcttgttgtaattgaggggataaatctgaccaaattgcctgaaaacgagtatgcatataggtgtctcccattaatcttctgctattgtaagattttaggcatctttacctattcttatatgtgattaaaatcatattttcaatgaaactattgcaactgaatgattaattgggagatacatctcaaatttatagtaaattgattttagcattagcataaaaaaccttcgctctgaacgaaggttttttatgtgttctattgatttagctaattagctaattagctaaaaaggtgcaaaataaaaggaaaaataaaaggtgcggtaagtgaagtaataataccgcaagtcattaatgctaatgaactatatgccccttcaatataatcgatttcagccgctcttgcggtacccactgcgtgagagacggttcccatcgctaaaccacgagaagcgtgagttggaatacgtaatattttaaatagcgtatgaccaaaaatggcacctaaaatacctactgcaataacacatgcagcactgattgcaggaataccacctatggaatccgcaacagccattgcgataggggttgttaccgatttaggcaaaatggaggcggcaatttcaggagtagcgccagcccataatgcaatcgctgtaccactagccatggcggcgatactaccaataaagcagatactaattaacgatttccattgtgcgcgtatttggtgtaattgttgatataaaggaatagctaaagcaacaacagctggttgcaacaagtcgttaaggatacgacttccggcaaaataatcctcataagcggtgtgtgtcactaataaaataggaataataacaacaatagcaatcaataacggatttaaaataggccatttaaatcgagccgccagtttacgtgctaagtagaaaataataagtgttagcggtaatgaccaccaaatattcattaatattaacattttttcttctcacttaacgctctgtcgtcgtcttgttgttctgctaattctacatcctctactttatcgggtttagcaccgataataggacgttcacgatgcacgtaatgtgagcagtaagcaactagcgccatcaccgcaaaggtactgacaacacaggccagaacaataggaaagagttgttggcttaataaattataatagttcattacacccaccccgataggaataaagagcaatgacatatttttcagtaaaatattaccaccgggttttacccaacgtaatggaataagctggaaggcaagtaaaccaaatagaataagtagtccaacaatactgcctggcaccgcgaaaggtaataaggctgaaataagattaccggcaaaaagacaaagataaagtataaaaaatgatcgtatatagtgccagattgtgatctgcacccgcttagatttcatagatatgtgtcctaaatcaactgacgtatttatcatacaccaattttcaaagtgtgctatggatcacaataaaaaaagagcggggctctttatagaaccccgctttgtatttgcattttgaataaaggtcagtttttatttcacttggtgacccggtttagccccactatctgggctaagtaagaaaatatcttcaccaccagggcctgcggccatcaccataccttctgaaattccaaaacgcattttgcgaggtgctaggtttgcaaccataacagttaagcgaccttctaatactttcggatcagggtatgcagaacgaatgccggagaatacttggcgtgtttctccccctaagtccagtattaattttagcaacttatctgagccgtcaacgaaatcagcctgtttaatttcagcaatgcgcatatcaattttggcaaaatcatcaaatttaatagtttcttgaataggcgcgtctgctaatggacccgtgatttctttgactggcgcaatggtactttttgaagcttctaccattgcattggctttatccatttcaatacgattaaacaatgctttaaatttagtaatttcatggtttaacagcggttgcgacagagcattccaagttaattcagtttgtaagaaggcttctgaacgttctgttaaagaaggtagaattggttttaaataagtcatcagtacacggaataagttaattcccatagtacaaatagcttgcaactcagcctctttaccttcttgtttagcaaccacccaaggcgctttttcatcaatatagcggttagcttcgtctgctaatgccataatttcacgaatggctttaccaaattcacggttttcaaaacattgtgcgatgctttcttgcatatcgacgaaatgttgatataacttcgcatcatcaaggtttgccgctaatttgccatcaaagcgtttactgataaaacccgcagtacgggacgcgaggttaaccaccttgttgacgatatcgctgtttacacgctgtacaaagtcttctaagtttaggtcaatatcatcaatacgtgatgaaagttttgctgcatagtaatagcgtaggcaatcagcatcaaagtgatcaagataggctcgtgccgtaataaaggtgccgcgagattttgacatcttcgcaccattgacggtgacatagccatgcacaaataggttggttggtttacggtattcactaccttctaacactgccggccagaataagctgtggaaataaacgatatctttaccgataaaatggtataagtcagttttgctctctttgttccagaactcatcaaagcttaaatcaccacgcttttcacataggtttaagaatgagcccatataaccaataggggcgtctaaccaaacatagaaatatttacccggcgcatcagggatttcaaaaccgaaataaggggcgtcacgggtgatatcccactgttgcagaccgctgtcaaaccactcttgcatcttattggctacttgctcttgcaatgcaccggagcggatccactcttgcaacatattgctaaaggctgggagatcaaagaaatagtgttcggtttcacgcattaccggcgttgaacccgataccacagagcgaggattaattaattctgtcgggctataagttgacccacatacttcacagttatcaccatattgatcgggcgctttacacttagggcaagtccctttaacaaaacgatcaggcaagaacatgcctttttcttcatcataaagttgagaaatcgttttacttttaatatgaccattttttttcagggctagataaattttcgtcgataattgacgattttcttcactgtgtgtggagtgataattatcgtagctgatattaaaaccggcaaaatcctgttgatgctctttgctcatctcttcaatcatggcttctggggtaatacccaattgttgagctttcagcataataggcgtgccgtgagcatcatcagcgcagatgaaatgaacttctttgccgcgcattcgttggtaacggacccagatatcagcctgaatgtgttcaaggatatgaccgagatgaattgaaccgttagcataaggtaacgcgcaggttaccaataatttattcgcgacgtgagacatagtaaggatcttacttccattaaattaaaaaaagggtctttgatgttaacctatccgtcatgatgtcgctagggcaatcatagagtttttgcaagagaaatttcgcttggcaaattgaggtaaggcattatcgtagtcattgactatctgatatgataggtgcactcagatatttaatgaataacgaaaatgagaggagccgggatgagtgataaatcccccgagcagactacccctgagattctgaaagaaaaagtttcaggtgtcttgtctacttttgaacacccgacattgaaacgtaatctgctttccctaaaagcattacatcagtgtgcgatgattgatgatgtccttcatatcgaattagtgatgccgtttgtgtggaaaaaacctttccaacaactgattgaagaaaaaacggcagagctgcgtaatatgacgggagccaaagctgttgagtggaagctaaaacacaatattgccacactacgtcgtgcaaacgatctaccaggtattaatggcgtacgtaatattctggcggtgagttcaggtaaaggcggggtgggtaaatccagtaccgcggtaaaccttgctttagcgctagcacaagaaggggctaaagttggtattctggatgcggatatttatggtccatccattcctaatatgttaggtacaaccatggaacgcccaacttcaccagatgggcaacatatggcacctattatggcgtatggtctagcatctaactctatcggttatttagtcacagacgataatgccatggtatggcgtggtccaatggcaagcaaagcgttgatgcaaatgctgcaagatacgttatggcctgatttagactaccttgtgatcgatatgccaccaggaacgggtgatattcaattgaccttatcacaaaatattccggtgactggcgccgttgttgttacaacaccacaagatattgcgctggtggatgcgatgaaaggcattgtcatgttcaaaaaagtcaatgtacccgtattaggtattattgagaatatgagtgcgcatatttgtagcaattgtggtcatcttgagcctatttttggtactggtggtgctgagaaattagccgaaaaatatcattgccaattattgggtcaaattccactgcatatctctttacgtgaagatttagatcgcggacaaccgacggtgatgcgtgatcctgaaggtgaattcgctgatatctatcgtgaaattgcttcaacagtttctgcgcaaatgtattgggatggggatgctattccaacggaaatttctttccgcgcggtataagcggtgaaacaataatctattgattattatgggaagtcttttaggcttccttttttttatccgctgaaatctgactatttttgataaaaaacaaagagatttttggttttacgctggaaccagaaggatttcaaaactataatctgcgcgagcgtaatatttacatattattacgttattcctcttttttatttcaaaccaggttttttattatggctgacacagcacatcagtgcacaattgtaggtatcgctggagcctctgcttcaggtaaaagtcttattgccagtacactttaccgtgaattaagagcgcaagtaggtgatcataatatcggtgtgataccagaagattgctattatcgtgaccaaagtgatttaacaatggaagagcgatataaagttaactacgaccaccccaattcgatggatcacgcacttttataccaacacttgtgtgaactaaaagccggaaacgccatcgaactccctcaatatgattatgtcgctcacacccgtaaatcagaaaccattcattttaaaccaaaaaaagttattattattgaaggtattctgttattaacagataaacgcttacgtgaagagatggatttttctatctttgtcgatacgccattagatatctgtctaatgcgtagaattaaacgtgatgtgaatgaacgtgggcgtagtctagattctgttattgaacaatataataaaactgttcgtccgatgttcttccagtttattgagccttctaaacaatatgccgatattattgtgcctagagggggaaaaaaccgtgttgcgatcgatattttgaaagcaaaaatcggacagttttgtgaataattgagttcatttgtaggcagctttcatgcatgattaaccatgaaactgcctgtttaacttgaagaagggaaataaaatgcgattatgcgaccgtgatattattcagtggcttgatgaaggtaaattagtcattgaaccccgcccgcctgtcgagcgaattaacggcgcaacagcggatgttcgcttgggtaaccagtttcgtgttttccaaggacatactgcggcttacattgacctcagtggccccaaaaatgaagttaatgaggcccttgagcgggtgatgagtgatgaaattgtattaccagaaggcgaagcgttttatcttcatcccggagagcttgccttggcggttacattagagtctgtcacattaccggataatgtagtagggtggttagatggacgctcatctttagcgcgattaggattaatggtacacgtcacggctcaccgaattgatccgggttggcatggacacatcgtattagaattttttaattcaggtaaactgccattagcattaagaccgggtatggtgattggcgcattaagttttgaacctatgtcaggctctgcggataggccttacaatcgtcgccaagatgcgaaatataaaaatcaacaaggtgcggtaggaagtcggattagcgaagattaattttcattaacgactattatcaactttattaagcgggtaacaatatgaaaaggtttttgacaacactcgccattttgcttgtagtgattttggcaggcttaacgacattagttttgctcattaaccctaatgattttcgtggttatcttgttgaacgcgttgaaaaacaaagtggctataaattaaccttacaagatgatatgcgttggcatgtctggccaaaactcagcattattagtggtaaaatgtcattaacagcccccggtgctgagcaaccattgatcactgctgataatatgcgtcttgatgtggaattatggccattactttcccaccagttggaagtaaaagaagtgatgctaaaaggcgcagtggttagacaaacgcctgagagtaaagcaatacctaaaataaccccgccttctgttgccaatgaagacagtactcgtccgatcattgagccaaaaacaaatcgttggcaattaaatattgctaaggtgaggatctccgatagtttgattatttggcaaaccaaagggggagagcaacttaatttacgcgatatcaatttattattaaaaacggacgacaaaaaacaaattaaccttgagatgagcaccaaaattaatcgtgatcgtcgcgagttaatgttaaatgttgttgctaatgctgatatgagtggctacccatatcaaatcagtggcaatatcgctcaattagattatgcattatcgggaatagggcttccggctcaagggatctccggaaatttaacctcagatttcaatattaaaaatgatagtgtaaatgttattgccttaaataatttaaatatgacggcaaatgagagtcagttacaaggtagcatcacggctgaattggctaaaaagaaccgctatcaagtggaattaactggggacactttaaatttaaataccctattacctgagttagcacagcctaattcatctgaaacggcatcgttaaccttggcaaataccccgtcgagatcattctcattctttagccatgctcaggctgcaccatcacccaatgcaactattatggctcgtccggttattacctccgcgacaattgaaaacaaagcgtatgatttaacccactggggtgatattgaatttagcttaaacttagcgctcaataagttattgtataaagaattagaaataaacaatgttaaattaaccgcattaaataaccccaaatcattaaatattgataggttagaagggcagatcctaaacggaaatttctcactgcctacggtgatttctactagcattgtgccagcgcatattagtatgaatgtcacaatgaataatatccctttgcaacctttattacgcgtctttgatcagccagaaaatttcagcggtttaatttctgctaaagggcatctagaaggtgccggatataatcgcaacgcgtttcttaatagttggcagggtacactggatacgtcattaagcgaatttaaaatgctaggattaaatattccacaagtgatccagcaatctattgcacaaacaaccgatcaagtggtttatcctgaagatattgagaactataccaaagccgatagtgtgattgcccagtttaaactagcgcctaaaggccgagtgacgttaaatcagttagatgctcaagcaagtgcttatcagatcagcgggcaaggtcaattagatctacaacgtcataatctagatgtgatgctgatggttaatatcaaaaaaggttggggtaaagagaatgaatttattcgccaactagccaaaatagatattccattaagattgtatggtaattggaatgctatccaatatgagtttaacgttgaaaaattactacgtgatcaattacagcaaaaagcaaaacaggccatagataattggttaaataagcaagatgatagccccgaagttaaagcgcttaatcaattattgaaaaaaatataatttttaaagttgttaacaaggtggaataactttttattccaccttgttttgtttttggctaataaattgattttattaatttatgattaataatctcttctcttatattaaacaatatctgtggaacacagatgctgcattacgtttcttatccccgttcccggttccctaccaccgttaacagaaaatggataaaatgattaaattatgctcatagtgcattatgtttatcatttaattcagtttttgcctaaaaaatactcattcgtactgtttacatgtaaaaaaatagtcgttttttttgatatatgtcatacactgcaacgttgcctttgggcagagtgtgtccattgcactaaatgcaaaaaaatgatgataaaaacaaaaagcttcattttataaataactatcgtagacaggaactatacatgattgaaattcttatcggcgccctcgtcgctgtgggtgttgggcgttacattgttaagggatattcgccaacaggtgtgctacttactggtgggctattattgcttatcatcagtgtgattatgggcaaatcagtattaccagccagtgtcacaagtaccggttatcgcttaatcgatattgttgagtatgtaaaaaatctacttatgagccgtggtggtgatctggggatgatgatcatggtgctatgtgggtttgcttcttatatgactcatattggtgccaatgacgtggtcgtgaaacttgcctcacgcccattaaaaatgatcaactcaccttatcttttaatggtagcggcttatattgttgcatgtttaatgtcattagctgtttcatccgcaacaggtcttggtgtgttattgatggcgaccttattcccagtgatggtcaatatgggaattagtcgtggtgcggcggcagctatctgtgcttcacctgcatcaattattttagcgccaacctctggtgacgtgattttagcggcacaagcttctgaaatgccacttattgattttgcgtttaaaacaacactgcctatctctattgccgcaattcttgggatgtgtattgctcactttttctggcaacgttatcttgatcgtaaagagcatatcgaaacagagatgttagatgtgaacgaaatcaaaactcacgcccctaatttctatgcgattttacctttcacacctattattggtgtattagtttttgatggtaaatggttaccagagcttcatattgttgccattattattctttgcatgatgttatctgcggttattgaatttatccgtagctttagtgctaaagaggtttttgccggtttagaagttgcttaccgtggtatggctgatgcatttgcccaagtggtaatgttattagttgccgcaggggtttttgcgcaaggtttaacaacggttggctttattcacgcgttaattgatggtgcacaatcattaggctcaggggcgattgttatgatgattgcattagtcttaattaccatgctcgcggcaatgacaacaggctcagggaatgcgcctttctatgctttcgttgaattaattccgcgcttagcaagtaatatgggtgtgaatcctgcttacttaactattccgatgttacaagcatcaaacttaggacggactttatcacctgtatcgggtgtggtagttgctgtatcaggaatggcaaaaatttcaccttttgaagtgatgaaacgcgtttctgtaccagtattggtcgggcttgtgattgtgattgttgcaacggaaatactggtacccagcacattaggttgatcatcaataaattattgaaataaagttagctttatctactttatttttcattctattgacgggctttgttatgtatagacaaagcccgttttttattaagcaccattttcagataaaaaatatccgccttagagacggatatttggttatttaatagaaattaagcttcgtcgacgttttcttcgtcttcaggtgttggttcaacaatacgtactttattaatacggtgattgtgtacatctaatggttcaaattcaataccatcaataaccactttttcaccgacggcaggaacgcgttgtaagtgttccatcaataagccagccaaggtttcatactcacgtttttcatccaacttaataggaatataaagcactaagtcttccagcggtgtaaaaccattgacagtccatgagccatcttcattctgtactaagtcgtgacgagagtcattttcctctgtacttactggtaaattaccggcgatggtttccattacatcggttaaggtaacaatgccttcgacagagccaaactcatcaaccacaaaggcaaagtgagtatgagcattacggaattgttctaatgcctgtaatagtgataacccctcagggaagattaagggttgtgtaattaataaacgcaaatctaatggttcattacgtaactgttgatttaataattgaataacatttaccacgccgataggttcgtcgctattttcttcgtcggtaataacgagacgagaatggggatcttcttctagtaattggcgaatatcatcttgggtggcttttagatcaacatattcaacatcatggcgtgaagtcataatactattgacgtttcgctggcttaaacccagaacgcgcacaatcatttggcgctcttgaggatcaaacacctcttctgtattagcaactaaatcagaagtgtgagggtcaagttcagaggcttctggtttaccattaataatgcgcaataccgcttccgctgtacgttcacgcaaagagcgagaagctgataagaagcgtcgacggttaaactgtgcgagttggttaaatatctctatcataatagagaaaccaatggcagcgtataaatagcctttaggtattggatagccaaacccttctgcaactaaggcaaaaccaatcatcaataagaagcttaaacataaaataacaatagttgggtgattattgacaaatgtggttaatggcttacttgcgaggatcatcaagaacatcgcaatagttacagcagcaatcataacgccgagatggtcaaccatccctaccgcagtgataacagagtctagagagaatacagcatctagtacaataatttgcgcaacaacagaccaaaaactcgtggttttacgttgttttccctcgttatgatctttaccttctagccgttcattaagctccattgtggctttgaaaagtaagaatatccctccgaggagcatgattaagtctctggcactgaaaggatgatcaaacagtgtgataagaggtttggttagggtgataagccaagagagactaaatagcagtacaatccgcataataagagcacacaataatcctgtgatacgtgctttatctcttaattttgctgggagtttatctgctagaatagcaataaaaacaaggttatcaataccaagtacgatttcgagaacaataagggtggaaagacctacccatatcgtcggatctacgatccattccatacagtttgttttaccttctataaagacggcatatgccgacttgggaataatgagcaatttagcggaatttttcaataaattattattgatagtggcagaataatttcattttatccaaagcaccgtaaaaccccgtccttcaggtcgaggatataaggcgcggttttttaactaactaggtgtttcctgttgctcaatgcaatgattgtcattgaggacttaaaggtcagtaacatgtctaaatcggcaaaaggtacgacagaacggcatggacggaacgtaaaagctaaatctggtttaaaccgctcaatactggagcagggctggtatgatatgcgccgtcagcttgagtacaagcagctctggcgaggtggtcaggtagtggcaataccaccagcctacaccagtcagaagtgcgcttgctgtggtcatacagcaaaggaaaaccgccagtcacaaagtcaattcgagtgccttgaatgtggatatacagcgaatgctgatatcaacggggcacgtaacattttagcggcaggacatgccgtgcttgcctgtggagggagggggcagtcagaccgcccgtcgaagcaggaacccgccgaggtgattcagacatcagtctgaacgcagtagggatccacgtcctttagggcgtggaggatgtcaaccataaggaatgcgatatcgattgcatcaataactaccaccaaatgagagagtgagttactatgtgatcaggttaacaaattgtcagtacattgagactggcaggtttatattcagacgggagttatttcatgtcaaaacagcaaatcggcgtggttggtatggcagtgatgggacgtaaccttgcgctaaacattgaaagccgtggttacactgtatctatctacaaccgctcgagcgataaaaccaatgaagtgatcgctgaaaatccaggtaaaaaactggttccgaattactctattgaggaatttgttgattcattagaaaaaccgcgtcgtattttgttaatggttaaagcgggtgaagcaacagataaaaccatcgcagccctgacaccacatttagataagggcgatatccttattgatggcggaaatactttctttaaagatactattcgtcgtaatcgtgagctatcggctcaaggttttaactttattggtacgggtgtttctggtggtgaagaaggggcattaaaaggaccttctattatgcctggtggtcaaaaagaagcctatgagttagttgctcctattcttgagaaaattgccgcggtggcagatggcgagccttgtgtcacttatattggtgcagatggtgcaggtcactatgtgaaaatggtacacaatggtattgaatatggtgatatgcaactgatagcagaagcttattcagtattaaaacactcactaggtttaactaacgaagagttagctgacacttttaccgagtggaataaaggcgaattaagtagctaccttattgaaattactgctgatattttccgtaagaaagatgaagaaggtaactaccttgttgatgttattcttgatgaagcggcaaataaaggcaccggtaaatggactagccaaagctctttagacttaggtgttcctgttacgttgattacagaatctgtttttgcacgttatatttcttcactgaaagatcaacgtgtggcggcatctaaagtattatcaggcccagcaccaaaagcatttactggtgataaaaaagcctttatcgagaatgttcgtcgtgcactatatttaggtaaaattgtctcttatgcgcaaggcttccaacaattgaaagctgcatcagatgaatataactgggatctaaattacggtgaaattgcgaaaattttccgtgcaggttgtatcattcgtgctcaattcttacaaaaaatcactgatgcctataatgacgatgcgaatatcgctaatttattattagcaccttactttaaaaatatcgctgatgagtatcaacaagcattgcgtgatgttgtttgttatggtgttcaagcaggtattcctacgccaacattctccgcggctatctcttattatgatagctaccgtgcgcaagtgttaccagcaaacttaattcaagcacaacgtgactattttggtgcgcatacttataaacgtactgataaagaaggcgtattccatactgagtggatggagtaagttttaaaaacagtgagttataagtgttaggggtgctgaatttcagcacctttttactatttgtaattaaaaagttatagttaaaaaatactttttaactgcattttatagtacttttattaatcattatcatcttggcgaataaaatgaattaactcgggctgagcaatccgctgataatcttgtgtatttaaaataatcgagcgttctaatgttccagcattaaaggctaattcatcaaaacgttcaaataatagcggatcagcaaccagttttagtgctggatgaaaactaaaaggtgggatcgcgccaaatacacattgcgttagttcatcaacttctttcgggcttgcaagagaggctcttgtcccaccaatagcgatagcgagttttgatagatcagcttgtttatcagcaggtaaaatggccagtacgtgttgtttaataccattaccttttacatgacaaactagaccttttgccccttgccctaattgtgtacctcttattttagcaacttcctcagaacgacccgcggtcgggtgttccatgacgcgataacgggcgtggtggttattgagtaatgtggttaattgctcgaaaatagtcaaagacatcaatgactcctaagattaagcatgtattcttattcggtcattatacgactttaaaaaaatttttctgcggtgatatgtttctttggtatttattattttgataagcctatcaaattattttgttacaaatgataatatgttaatagtattatcctattgaattaataggataattagattatctatattattttagagctctaatattataaaaaaattaatatttattcattatattgataatgatcaatttaagaataaaaagaatagaacatattaaaacgtagattaaattactaaaaggaagtcaataatggccagttcaacattttatatcccttcagtaaacaaattaggcgcaggttgtcttgcagacgcgataaactcaatgaaagactttggctttcataaagcactgattgttactgatagtgttttaaatcaattaggtgttgtaaataaagtgagtgaattactggcgaaatcaggtattgctagcgttacttatgatggtacagcgccaaaccctaccgttgaaaatgttgaagcggggttagccttattaaaagagcatcaatgtgactgtgttatctctttaggtggtggctctcctcatgactgtgctaaaggtatcgcactagtcgctgccaatggtggtaagattgccgattatgaaggggttgatcgctctgagcatccgcaattaccactgattgcaattaatacaaccgctggtactgcttctgaaatgacacgtttttgtatcatcacggatactgcgcgtcatattaaaatggctattgttgataaaaatgtaacaccaatcttatctgtaaatgattcagagttaatgattggtatgccaaaaggtttaaccgcagctacgggtatggatgcgttaacccatgctgttgaagcttatgtctctactgccgctaatcctattactgatgcatgtgcgttaaaagcagtgacgatgatcagtgagtctttacgtaaagtcgttgaaaacggtggtgatacagcagcacgtgaaaatatggcttatgcacaatttttagcgggtatggcatttaataatgcttctttaggttatgtgcatgctatggctcaccaattaggtggtttttataacttacctcatggtgtatgtaatgcagtattactgcctcatgttcaagcttataacatccaagcagcagcaggtcgtttaaaagatatagcgcaagctatgggtgttgatgtttcggcaatgaatgatgagcagggtgcgcaagcttgtattgaagagatccgcaaaatcgccaaagatgtcggtattccagcaggcctgaaagaattaggcgtgaaagaagaagatttcaaaacattagctgaaaatgcattaaaagatgcatgtgccatcactaaccctgttcaaggtagtgaaagtgatgttatcgagatattccgccaagcaatgtaatcgctaaaaataagagggttaatataaattaacatcttgtttaagcaaagaattaacacctcaaatatcaatgtcgtatttgaggtgttttttatattatcaagtataaagtggtcatgtagtttaatgactgatacttattttattgcgcttttttatgacgcttttgtaagcaatcaatcacatcagatagagatagcgattggtcttgtaatagcaccattaaatgatagagcaaatcagaagcttcattttttaactcttcacgatcattaacagttgcagctaaagcagtctcaacaccttcctctccgactttttgtgcgatacgtttggttccgctggcataaagttgtgccgtataagagctatctggcgaggcgcttttacgctcgcgcagtaagttctcaagctcataaagaaatccccattggctttgagccggagcaaaacaactttcagtcccattatgacaagtaggcccgattgggtgagctaaaataagtaaagtatcgttatcacaatcaggataaatatccactaatttaaggaaattgcctgatgtttcaccttttgtccataaacgttgtttagttcgtgaatagaaagtgaccttgccactgtttagcgtcatttctaatgcggctttatccatataaccaagcattaagacatcaccagaaatagcattttggataatgacaggcattaggttatcgactttttgccaatctaattgggcgagttttgtattattcattatattcttaccttaacgccattttctgcgagatactgtttcaattcgttgatattaatgatctgcttatggaatacggaagcggcaagggcaccgtcaacattggctaatttaaatgcatccagaaagtgtgacatttcacctgcaccgccagaagctatcatgggaacctgagtgacttggcgtaccagtgcgagttgttttaaatcataaccttgtcttacaccatcttggttcatcatgtttaacactatttcccccgcacctcgttgctgtacttcttgtacccaatcgagcgttttccatggcgtttgttgtgtgcgtttttcatcacccgtaaattgataaacgagatattccccagttttttcatcaaaccatgtatcaattcccacaactacacactgcacaccgtagcgatcggcaaggcgagaaatcagtgttggatcagaaagtgcaggggaattaattgagattttatctgccccaaaagagagaattttcccggcatcttctactgagcgaatgccacccgcaacacaaaatggaatatcaatcacttcggctacccgcgatacccaacttttatcgactactcggccatcagaagaggcggttatatcataaaagaccagctcgtcggcaccttctttcgcgtagcgttctgctaagggaacaatatcaccaataatttcatggttacgaaattgcacacctttaacaacctgtccatcacgaacatcaagacaaggaattatgcgttttgccaacatgatatcgcctcttgtaatgtgaatttaccttctaatagtgctctgccaacaataatgcccgcaacacccgatccaggaagtgctgcaatatcctgtaaatcaccaataccgcctgaagcttggaataaaatatcagggaaacgctggctaatttctttatacagttcgacgttagaaccggctaaggtgccatcacgagaaatatcggtgcacaatacatgctttaatcctacaggttgataaagtgcgatgatctcttctagtgtatagggggagttttcttgccagccacttaccgccacccattttttaccttgttcgtcgatacgaacatcaagggcgagtacaatcgcatcagcaccataacgctcaaaccatgttttgactaattcgggctggctcaccgctgtagagccaatcacaacccgacttgctcctgcggctaatagtgacttcacatcttcttcgctacgaataccaccaccaacttgcacaggaacgttaacacaggcaactagctgttttaatagtgggatctgccgtgcaagtggatctttcgcgccagttaagtcgacgagatgcaataattttgctccgtcttgttgatattgttggtagcggcggatcggatcatcatcataatcacgttgtttattataatcaccttgatgaagacgaacgactttgccatcaattaaatctaatgccggaataatcataacgcgttacatctccaaaaaattcttaatcagttgagcacccgcttttcctgagcgttcagggtgaaattgcaccccatagaaattatctttctgaatggcactgctaaagcgtgaaccatattctgtttcggctatggttgagtcattgagccctaaaccatagctgtgaacaaaatagaaccaagcgtcgctgtcaatattgcgaaatagagggtgagcgggttttgctaatacctgatcccaacccatatgcggtaagggtaatcctttggtatcaagtttattgatattaccgtcaactaatcctaatagagggatattgtgaccttcttcactcagagaggccaaaatttgcatccctaagcaaatgcctaatacgggctgggttaacgctttaattaaagggataagttcacgggcttttagttgttccatagcggcactggctgttcccaccccggggagaaacagtttatcagcagataacacgatatttttttcataagaaataattggatcgtaacctagcctttgtacggcgtacgcaaccgaggctaaattagcacaacctgtatcaagaatgacgactttcatcacagcacaccttttgaactgggtaaggtatttccttcaacacgaatagcttggcgtaaggtacgaccaaatactttaaacagactttctgctttgtggtgatcgtttttgccttttgattttaagtgtagagtgcagcccatagtgtaagagagagagcggaaaaagtgctcaatcatctctgtgcttaaatcaccaacgcgctgatatttaaattctgctttatattcaaggtgagggcgtccagaaatatctagcgcacaacttgctaggcactcatccataggcaaagtaaaaccaaaacgtgcaatgccgcgtttattacctaatgcttctcgcagtgcttcgccgagtgcaaggcctgtatcttcaacggtgtggtgatcgtcaatgactaaatccccttgtacattgatattcatacgaaagccaccgtgggtggcaatttgatctagcatatgatcaaaaaaaccaactccagtgctaatttggctctcgccttcacgatcaagccagatatcaatggcaatttgtgtctctttggttttacgttcaacgtgggagtagcgatcttttttcgtcagcaattcactgatagctgaccagcttaattcattggcgttataacgtaatccgttgatccccatattttcagctaattgtagatcggtttgtctatcaccaatcacatagctattggttttatcaagagcactttcaaccagatattgggtgactaaccctgtttcaggtttacgacaaggacagttgtcttcaggtttatgagggcagattaatacttcattaaaaacaataccttgtgaagaaaaaacctgcatcatgagattatgagggggttcaaagtccgcttgtggaaaactgtctgtaccaagcccatcttgattggtgatcataataagcttatagcccgcctgttgtaagttgagtaatgcgggaataacgccattttcaaaggcaagcttattgagactatcaacttggtgatcggttggtggctctgtgatcaaagtaccatcacgatcgataaaaagaattttctggctcatggttgagatccctcagtggtgatttttattgttatcattggtgatgtttatacgtttgccgtttgcctattttttatagcggttatcacgctatcacactcttgacgcgtaccgatagagatgcgtaaacaacctgccagcccatattgacgctgttgatcgcgtaaaataatcccttgctcccataaactgcggaaaacacaatcagcatcagtgaatttcactaaaatatagttggtttcactacaataaacctgttcaacattgggtaaattttttagtgcatccgctaaatatgttctattgcgtacaatttccgttacccgttgtttcatcgcttctataccttggtcagttaatgcttgtgccgcaatatcagcaaccggggtagaaagtgggtaaggggcgatcaccttaagtaataattcaataacaggtgaattggcaagtgcaaagccacaacgcagtcccgctaatgcaaaagctttagagagagttcgcaaaatgactaaattcggatactcttttaaccaagtgactagtgatgcttgaggacaaaactcaatataagcttcgtcaatagccacaatggctttatcttttgctaatgctaatacttcgcggatcagtgaaggatcaacgatattgcctgttgggttattgggactacataggtagataagttttacattatcaagttgtgatgcaatggctttgacatcaggctcccaatcagcaagagcagggacaacacgctgttctacaccaaaggtttccgcactgacgctgtacataccataagtgggtggacaatagagaacagcatctttaccaggctcacaaaaagcacggatcagtagttctatcgcttcatcggcacctcggctaactaacacttgctcaggttggacgcctgcatatgctgcatagcgattaattacgttaaccggctgacactcagggtagcggtttaaatttttttcattaaacgtaaagtcaggagcggtagggtattcattggcatttaaccaaaccgagccatttccacctaaacgtctcgctgattgataaggggttaactggcgaacattttttctggctaatagggtaatatcaaagggcgtgttcatagctagttatctccttgagccaaggcgttaacgcgaagtgtgacggcatttttatgtgcagttaattgctctgcttgcgctaatatttcaatggtattggctaaatcagccaaaccttgagcagtcagtttttgtatggtcatacgcttcataaaatcggctaagcctaaactcgaataggtggcggtataaccgtatgtaggtagtacgtgattggtgccagaagcgtaatctcccgccgattcaggagaccaagcccctaagaacactgagccggcgctagtaatgctatcaacaagtgagtctgcatcattagtctgaataattaagtgttcaggcccatagcgattactgatttcaatacattggttgagatcacgggtgataatgacacgactttcggctaaggcttgttgtgctatttctgcgcgagttaattgtgttaattgggcttgcgtctcgctaatgaccgctttggcaagggcttcatctggggttaatagcaccacttgtgagtcaggaccgtgctctgcttgtgatagtaaatcagcggcaataaaggcaggatgagcatcggcatcagcaatcactaatacttccgaagggccggctggcatatcaatagccgcaccttgtagcgattggctgacttggcgttttgcttctgtcacataggcatttcccgggccgaaaattttatctacctttgggatagactctgtaccaaaagccatcgcagcaatggcttgagcaccaccgacttggaatatttcatcaataccaatttgttgcgcaatatacaaaatttcatcagcaatcggtggcggagagcataaaattattttgcgacaaccggcaatacgggccggtagccccaacatcatcacagttgagagtaaaggcgctgatcctccgggaatataaagtcctactgcatcaatagggcgactgacttgttggcaaaatacaccaggttgcgtttctacctcaatggttttaggaatttgcgcttcatgaaaacggcgtatattgctcatggcttgcgctattgcttgtttgatttcgttattgagccttgcacaagccacgtcaatctgtgtttttgtcaccaatacgctatcgggagccgctttatcatatttttgactcagtgccttaagggctttatccccatcgttgcgtacctgagaaataatcgtagcaacttgctctgtaatagacgctgatgcggatatcgctgggcgagtgagtagctgttgttgttgctgttgggtgcatttatcccagaagtttaatgtattaaacgccgttttcatcatctcaccttattccatcattttttcaattggtaaaacaagaattgaacttgcccctaatgcttttagtttttccatcgtttcccaaaagagggtttcactgctgaccatgtgcattgctactcgattttgatcacccgctaaaggaaggatggtcgggcgctcagcacccggtaatagggcgataacatcttcaaggcaatcacttggcgcgtgtaacataatgtattttgattcgcgcgcttgaataactccttgaatacgcgtcattaagcgatcgataagggcttgttttgttgcgtccatttcaccgtcacgttgaattaaacaagctttagaacgataaataacttctacttcttttaatccattggcttctaatgtggcgccagtagaaactaaatcacaaatagaatcagccagaccggctcgaggtgcgacttcaacggagccatttaataagcaagatttaaaggtgatccctttttggtctaaataacgttttaatagattagggtaagaggtggcaatacgggtattattgaggcattcaaccccttgataatcaaaatcaaccggtgcagcaagagataaacggcaagcaccaaagtcaagacgacgcagtgtgatataacttggattttctccttgtgctcggcgttttagtaattcttcttctaatacgttttcaccaataatgcctaaatcaaccactccgtccatcactaaaccggggatatcatcatctctgacacgtaaaatatcgataggcatattttccgcataagcgataaggcgttgttggtttaagtttattttaatgccacaacgcgctaaaagtgctcgtgaatcatcacttaaacgacctgatttttgcatggcaattcgtaatcttgctttatctaacataatgttaccctatctttgtccgtattcttgttatgaaatttagctataaaaaaaccccggaagttgccttccggggtttttattttattgtctgcactcagaccaccggaagcgttacctaaacgtcttccagcactcatcgcctgaaagactagtcaggatgatggtgatgatggtggtttaattgaatgctatacataatgttttcctagcgaataaaaatacccgttataaataattaaccagtatttagaatttgtctgcctttcaacctacctgatttataaagtaaaaagcaacctattttttaataataatttaaataaattgtaaccttatgttttttagagaattttaatatttcttttctttacttaaccgagtaagtgcgccagtatattaaagcaggctaaatatatataacgcttaagcagtttttatcagtaatggataaaattaagttttgttacataatttaaataagccatgaaagtaggggtagaaaatgaaacggatcacgatagtcggattaggttggttaggattaccacttgccaatgccttgcgtgaagcggggtatcaagtaaaaggaacaaaaaccacagaagatggtgtagaagcagcacgaatgagtggtgttgattgttgtctaatgaatttaacaccggctattgagtgtgatagagatgattttgattacttaatggaaactgacgtactgattattacattacctcccagtgcggcggggggaggatatgattatgttgaagggatacaaacattagtggatagcgccatgtctcggcatgtgacaagagtgatttatattagctctacttcagtatatggcaatcaaagtggtgttattacagaagaagttgatattaggccggaaacgcaatccgctaagatgatagcggaagttgaaaattggttacatcgcttaccacttacgaccgtcgatattttacgtttggcggggttagttgggcctggtcgtcatgcaggacgctttttatccggtaaaaaacaggtcaaaggtgcacatcagagtgtcaatttagtgcatttagacgatgttatttttgcgatagagcaactgcttgctcaaaatgaaggaggccgtttatataatttatgtgcccctattcatcctaaaaagaaagatttttacagccgtgttgctgcacagttagatcttactccccctgaatttgctctagaagataaaccgccagcacgagagatcgacggtcaggagatttgccgagatctcggattccattatcactatcctgatcccgacaaaatgccaatgagttaatttaccggcagtaaaacgacatcacggaagatctgattttcacttaattgtgcaaaccagcgttgtagatgtggataatttgcaccttcttggcaaacctctagccatgggtataccaaaggagcaatagcgatatcagctaatgaaaaatagtcaccggcaaaataagctgttttagccagttgatcatcggcaattttgatcagttggtttaatttcgcttttaggctctgtacaagctgtggatcttgctgctcttttggtgtgcgaacaagatttatcatcatttgttggattggagaaaaaaggctaccattcgaccaatccatccatttttcaacgtttgcgcgttgctttacatcggttgggtagagatgataattttcatatttggtacataaataacgaattatggtatttgactcccataaggcaaaatcatcatcttgtaaggtaggaatagatgcattgggattgagtgctaaatagttggcctcatgaagtccaccaaaagggcctccgacatcaatttgttcgtaaggagcttgaagctcttttaaacaccacaggacttttttaacgttcgatgagttttttctaccccagacttttaacataaaggtctcctaaaccacgataagtaacaaaaattccctctgtagggcgttaaatatgaatataagataaatctttatctatcaatgttggcgtcttattccataaagccctatagtaggaaagctttaacaaattgatataaaagggtgatcggtaatgaaaacaaatcttccatccgtattggctaaggttaccgcgggaatgggtttactgctaattatttctagtcctacttttgcggtgaataatcctgtgccgcctcaaattgaggctaaatcttacgtattaatggattataacagtggaaaaatacttgcttcagagaagcctgaagagcgcctagatcctgccagtctaaccaaaataatgagtagttatgtggtaggacaagcgataaaagagggacgtatgtcgcccgatgatattgttattgttgggcgcaatgcttgggcgacgggtaatcctgttttaaagggctcatccttgatgtttttaaaaccaggcgatcgagttaaagtgatcgacttaaatcgaggtatggtgatccaatctggtaatgatgccagtattgcgttggcagaacatgttgccggtagccaagaaacctttgttgatcttatgaatacctatgccgcgaatttaggtttaaaaaacactcactttaaaacagtacacggtctagattctgaagggcagtacaccacagcacaagatatggcgttattaacagctgccatgatccgcgatgtaccttcagaatatgatattcataaagaaaaagaatttaccttcaacaatattcgccagccaaatcgtaaccgtctattgtggaataaaaatatgaatgtcgacggtgtaaaaaccgggcataccaatggggctggctataaccttgtctcttcggcaaccgaaggaaatatgcgtctgattgcagtggttttaggggcgccatcagataaagtgcgttttgctgaaagtgaaagattactcggctggggtttccgcttttttgaaaccgtgacacctgtaaaagagaacgtgcccctgactacgcaaaaagtatggtatggcgataaaggtgaagtggctttaggtgttgctaaagatgcatcaatcaccattcctaaaggagagctaaagaacttaaaagcctcttttacattgactaaccccgaattagaagcaccattaacacaaaatcaagtagtaggaacagtgaatttcttactaaacgatgaagtgattgagcagcgcccattagtggtaaaagaagcggttgaagaaggtggtttctttagtcgtatctgggactttgtggttaaaacagtctctggttggtttaatgcgctttttggttaattaagttcataattactgaaaaactcacccatttaaaataagaatgccagtattaactggcattctttattgagtaggttttaagtgccttagaacagtccttttattgccccatgatcatcaacgtccatcgccattgctgccggttttttaggtaatcctggcatcgtatttattgtgcccgttaatgaaacaacaaagcctgcaccagcactgacatacacttcccggatattaatggtaaaatcagtcgggcgaccaagtaatgcgggatcatctgatagagaatattgcgtttttgccatacaaatagggaaatggccaaagcccatatcctcgatttttgttagcatctcttgggcgttagcattgtaagtcaccccttttgcaccataaatttcttgagcaatggtctctatcttttgctttaaaggcatattatcagggtagagtaattgaaactgtggtgcatcattttctagtgtatcaataacctgattggctaattcaataccacccgcgccacctttttcccatacttgactaatggcaaaacgacatcctctttgctggcaatattgggcgataaattcatgctctttagcagagtctgtcacataagcatttactgtaacaataaccggaacaccatattttttcagattttcaatatgcttacctagattttcgatccccgttgctaaagcggtgagattttcgtgatcccactgtgttttgcctaagccaccattatattttaatgccttagtggtaacgactaaaactgcacagtctggttgtaagtcgcctatgcgacatttgatatcaaagaatttttccgcacctagatcagcaccaaatcccgcttctgttacagtgatatcagccagttgaagagcaagtttagtcgctcttaggctattacagccatgggcaatgttggcaaaagggccaccatgaataatcgcgggggtattttctaacgtttgtactaaattaggattaagggcatctttaagtaaagttgccatagcgccgacagcgttgagatcttcagcactaacaggctcgccttcatagttatatgcaacgatgatacgtgctaagcgctgttttaaatcattaatatcttttgctaaacaaaggatagacataatttcgctagcaacggtgataacaaagctatcttctctaaccaccccatctttgtcgccacctaatccaatcactaaatgacgtagtgcgcgatcattcatatccatacagcgcttaaaaataatctttttaggattaatgttaaggggattaccttgataaagcgagttatctaacatcgctgctaataaattatttgcagaggtgatagcatgaaaatcaccggtaaaatgaagattgagatcttccatcggtacaacttgtgaatatccaccgccagccgctcctccttttagaccaaaacaagggcctaaggagggttcgcgtaatgcaataatggcacttttgcctaattgattaagggcttgtcctaatcctaccgtaacggtggttttaccttcacctgctggtgtgggattaatggaagtgacaagcaccaatttaccctgtttttttgaggtgatttttgaccaaatactctggctaaacttggctttgtatttgccataaaattcaatatcgtcttggtctacatttatttttttagcaatatcttggatgggtaaaagcggtgcttgatgggaaatttcaatatctgatttcattttggttctctttttatcccgtgtagagctacatgagtgataatgcatcaatgctatcgattcaacagatcaagaaaaaatgtgtcgctctgttgctacttattgagcgaataaccctctaattaatcaactttagctaataatataaatatgaccaatagatttataggtttatagatattggactttagaagatatgctcggtgtcacatgatactgccattgtgataaaaaatataaaattattatgatgtgattgaagagatataggacgggggagcaaaaataaataatgccagcaaaagctggcattggtttatgggtaacaatcatgtcaaagtgttaaattaatcgcaagagactttaatggctaagccaccttgtgatgtttcacgatatttagaattaatatctttacctgtttcatacatagtctcgatgactttatctaaacagatacgtggatcactgacacgacgaagcgccatccgtgctgagtttaccgcttgtacggcggcaatagcattacgctcgatacaaggcacctgtacttgtcctgcaaccggatcacaagtaagacctaagttatgctccattgcgatttcagccgcaatacagacttgctcaggactaccccctagcagttcagttaaagcccctgcagccattgagcaggctacaccgacttcaccttgacaacccacttcagcaccggaaatagaggcattcattttgtacagcgacccaataacaccggctactaagaaaaagcgtgtataagagttttcgttgactgggcgaataaatttatcgtaataggagagtacggcaggaataataccgcatgcgccattagtgggtgctgttacaacacgtccaccggcggcattttcttcgtttacggctaatgcaaacatattgatccaatcaaccactgtcataggatcggtggtggttttatcttcagtcactaacatacgacgtaatgcagacgcgcgacgaggaacacgtaatggtcccggtaataagccttcggtattaacaccgcgctcgatacctgatttcattacctcccaaacggcagcaaaatgggctgagatctcttctttactgcgtaatgcaagctcattttgcatcaccagtgcagaaagagagagaccggtttccttacagtgacgtcgtaaatcagcagcatattgataaggataaggtacttcaactttattctcttcgggctgaccaaaatgctcttcatcaacaataaagccgccaccaatggagtaataggtttttttcaacagaagttgttcgccattataggcgctgatagtcataccattttcatgaagaggtaaattacttttatgaaaattcatgcctccaaccgcggggaaatcaacctcttgagcaccattagctaacatcaaacgtccggtattttcgacttgtttaataaaaggtgcgatagcgtcaatatcaaccgtatcaggtaaattaccggctaatcccataataatcgcgatgtctgttgcgtgacctttacctgttagagataaagagccatacacatcaacgactacgcgggaaacagaggagagaaggtttttctcagcaagtaaatcgacaaattctttacctgctttcattgggcctaccgtgtgtgagcttgaaggtccaataccgattttaaaaatatcaaaaacgctaaccataatattcgcctccctaatttaaaggcgcactgtgtgttattagaatgaaaactgttttgtagactgtagcgatatggctactttcattttagaaagtagccatcgataaacttattagttaaagaaataattaatgaaagtgttacctaaggtgtagaaaaccgctgagattgcaatcagacccatgataacaacaaatacgttgctaatatggccttgatattttttcatcgctggtactttacggatagcatacataggcattaagaacagtaacattgcgatgattgggccacccagtgtttcaatcataccaaggatacttgggtttaatgttgcaacgatccacgttgtaaccaacataaacagagctgtgattttgtttaaacgatctttttcgacattcttaccaattccgcgcatccctttgataattaagccattgaaaccttcacgagcccctaaatagtgacctaagaaagatttagtaatcgcaacaaaggcaatgaaaggtgcaatgtaagcgataacgggtgcttcaaagtggttagcaagataagacagaatactgatgttttgctcttttgcttctgctaaattttctggtgttaagctaaatacgcagctaaacacgaagaacataacagtgatcaccatcatgatatgagcataagctaagatgcgtgaacattttttctctgcattgtcaccgtactcttcgcgttttgccacagcaaaagcagagatgattggtgagtggttaaaagagaacaccatcacagggatagctaaccataaggttactaacaagccttggctcataccagaagttgaggcgtgatcaaaagagagcgtatcaagaatggcaccattccattcaggaatgaggtataaagcaagtaccatcaagatggcaacgaatgggaatactaagacactcattgctttaacaatagcttgttcaccaaagcgaatgatacacataataccgacaatcagtaccagtgataaaatcgcacgaggtggtgctgtcatatgcatttggtgaacaataaagctttctaccgtattagtgatagcgacactgtaaaccaacaagataggataaatagcaaagaaatagagcagagtgattaatacacctgctgttttaccaaagtgttcttcaaccacttcagtaatatcttcacctggatttttacctgatagcacaaagcgacacataccacggtgtgcaaaaaaggtcataggaaaagcaagtactaacataatcaacagaggaattaagccaccaatcccggcattgataggtaaaaacagaacgccagcaccgatagctgtaccatacaaaccgagcatccatactgtgtctgacttacgccatgttttgtaatcactttgggtattaccctgtgcgatagaaccagctttggttgtatccataatactctccgaaataacgcggtaaaaaaataatgaaaaataaagtgagtcattgcctttttacaaagcaatcactgcataaattttattatgaataaatgagcgcattgagtgcctggtgttatctcaatatcttcaattaccacatactaaaaaagctagattttaaaagaataaaaatcttctaaaatttgaaaaaatattcaataagtttatatctagactttagatgggcagaatatagtgtttttcaggataaactaccgtgatcaccatctcaaatgctaaatataactaaaaaatcgctaaatgtaacattttttatactttgtgctttttataaacattttgaaatggttttccaaaattgtttattttttagaataaaattaaatatagaaatattcatatgttaatgattatttttcctgctttctattttttataaaatagatgatttaaatcaatgaggttatttttatttacatttaaaacattattttaactttataatatgttgatttatatataaaaaataaattttgtgacttggctaaaaaatcacttaaaagcctatagaaataaaaaaatatgattatttattaatggtcttctactgtttgataaaatagttatctcattattttatcaataacagaaatattgtttatatttggtacaatattcctgttaataaaatcataaaatattttatttctagtgaatataaaaacttcattttgattaaaataacaacgaaattattttttggacaaaaaatataataatagagaatatttttattcatatattaatatataaaatctttatttatttatattaaatagcagaaaaagacaataaaaaagaccacattaatactgtggccttttgcggttgtttcttatcctaataggattaagcttttgtccaacctttgcgaataggatatgcaaagcagagttgataaagctggtggatcgctttttgtaactttttcccgccttgtgaccaaagtatttggcttaatgcacaagagaggagagcaacaataaatgcaccaaccatatctattggccaatggacgccaagatagatacgagcccaagcaatcgcaagacctaaaataagcatcagcatgccaatgcgtttactgttatgccaaaaaagataagccagtgcgatagtaaacacgaaagtaccatgattactagggaaggaaggcgttgcctcatgatcaaggaagttataaccgatattggctgcaaaagggcgatcatggggagctatcataccgataaaccaagagatagagagggcaataatcagagcgaccccagccttacaagctaaagtcctttgctgatcaatatgcttttcatttccccatagccaatagaaagctaaagacagagggaacaagtaaaccaagtatttagcaataaagatcgcgacattaatctctaaaggggaggccgaaggggttgcattcatcaatgaaaatacggctaaattgagttgttccagcaaagtaagctccatatatatcgtgctgataggcaatgtttatggtacataatcagtcaatcccacaaggttaaatgaggctgtgcgcagggtaaagagtaattttcttatttaattgtgctttttttcaagaattgtcagttttttttcgctgactgactgaattgactaaaaaaacactttacccttgagtaattgcacttttttatctatcacccatatgtttaaaggtattaatcaatgtggtttcaaaaagagattttacttcaagcaaaaccgagaggatttcatttaatcacacaggcactgttgcaagaattacccgaactcagacaatacaaaataggtattgctcatttttttattcaacatacttctgcgtcattaaccattaatgaaaacgccgatccgactgtacgtagtgattttgaaagtttctttaatcgctgtgtgaaagagcatgaagcttattaccttcacacttatgaaggcagtgatgatatgcctgcccatcttaaaagtagtttacttggtcagagtgtgtcggtgcctatttgccaaggggaattaaatttaggtacatggcaggggatttatttaggtgaacatagaaatcacggtgggcgtcgacgtattgtggtgacattacaaggagagtgttactgaattttaggcaataaaaaacccgacagttatttcaccaaaaggggttgaaactatcgggctcctcaatatttggggacatcaaagaaaagcagtggcactaattcagactacgagttaaaaagaaagttcgccaattaatgaaaaaaattagaaatatttttagtaagtggtctgaaaagggaaaaaacaacggagaaagtagtaggtaaaaaagaatgaaaacgctaaaacacattgataaataaagtattttagcgttttaaaaattagttatagatgcctaaatgctctttcgcataagcttcaaaatctgtgcagccaccaatgtgtttttcatcaataaaaatttgtggcacagtttcaactggtttaccgacagtttttgataagtctgctttggtaataccttcagcttgaatatccacatagcggaaatcaaagtcatcacgtttttcagacaaggtttcagcaagttgtttagctcggacacaatatgggcaaccaggacgaccaaaaattacaacaaacatacgacactccttattgaggaaataaattcaggcataatagtctttatttgtgaatactatgcctttttattcgaataaacaaaaacagttattgccttttagtgtaataaattatatcaatttgctgaatgatgatataggactagtgcaaggtgatgaacggagacaacatggaaaagccctctaaacgggatatgaaaacactatcagatatgccaaagccaattattattattgaactaattggtattgtgctattggttatcgcttacttatatattaatcaatatatgacttcaccggaatggttaacaacctatacagggcaattgaccttggttgttttaggggtgctttgtatgatcccacctgcaatacatatcgtttggcgagcgatctatcgtttaaccttcttaggtattgatactaaggcaactgaaaataaaaagaaaaagccacataacgaaaaataaatacagttttatatcatgatgagtgaaagaggctaggtgacttagcctctttgtcacttgactttatttgtggcgtttttctatttattactgccttctggtgaaaaaaagtggcaaaataacgtcaatgcagaaaagcactcttatttttagcgcgtaaaggttatttaatggacgctgttgttactatcgatctggatcagctgaaatcttggctggatgaattacagattgctttctatgaatgtgactcttgtcaggcgttacatttacctcatcttcaatatatcaatggtatttttgatgctaaaattgatgtgcttgatgatgtgcttgtttttaccgctattgctgaattaaaaccatcagcgatagtgcctgttatggcaaatcttagtcaaattaatgcaagttccctatttattaagacgttcctagaaattagcgatgaaaacttaccgaaattagttttgagccaatctttacctattgctgtgggactatcatttaatcagttcgagctgtttttacataaggctgaagagcagtcagcagaagtgatcagtgagatctttaataatgattttctgtatggcgaaagacaagaaaatgaagaagatgaagatctagacataacatcatcatcaacagactcttcatatactgtacattaattactatctataacggtcacaaaatcttatgcaatgcgcacgctccagtgcgggtgattgccactcttgtgggtggctttctcttgcttattccgaacaaattaatcaaaaacaacataatctattagacttattgcccaaaaactacgcgtttactcaattagcgccggtagaaagccaacaagttaaatttcgtaataaagcgaaaatggtagtaagtggtagtgtcgaaaaaccgattttagggttacgtaaaccagagggggaaggtgttgatttatgccaatgcccactctatcccgcttcttttgaaccggtttttccaatattaaaaacctttattgccaaagcaggattagtgccttataacgtggaacgtcgtcgaggcgagctaaagtttattttattaacagaaagtcgccacaatcacagcatgatgctacgttttgtgctgcgctcagaaaaaaaactggcgcaacttcgccaagcattaccatggttacaggctcaattaccccaattagccgttatttcggtgaatatccaacctgtccatatggcgatattggaaggtgagcaagaaattgtattaacagagaaaacctttttagatgaatattttaatgagattccgttacatattcgcccgaaaggtttttttcaaaccaatcccgatgttgccgcgtcactgtatgcaacggcagggcattgggtcaaagagttgcagataaaccggttatgggatctcttttgtggctcaggggggtttggcttacattgcgcacaaaaaaacacggaattaacaggcattgagattagtccagaagcgattgaatgtgcacgtttatccgccaatgaattagggttagagcatgtagaatttcaagcgctggactctactggttttgctttagcaaaagagtctgttcctgaattagtactggttaatccgccacgacgaggtattggcgaaacgttatgcgactatttaaatagtatgaagcctcgttttatcctctattccagttgtaatgctcaaacgatggcaaaagatatacaacaactttctcattatcgtatcgatagagtgcaactgtttgatatgttccctcatactgctcattatgaagtgttgacgctcttggttttacaacaaagttaaacgctaatttaatcgcaataacatgttattgtcgttaacgcttgataattttaactgcacaacttaataacccccaaagcggttgttcaactttgggggttaattttaaagcaaaaaacgtggtgtaatgattaaagttgcactaatcacgatgttcaaaagctaaggctttcttctcaattaatctcattaacagtgtcagtattccattgatagctaaataaataatgcctgcagcaacaaataccatcacatcataattttgcccaaagacttgtcggctatagccggttagctcaagtaaagtgatagtgctagcaagagaagtactcttgaaaatcagcaccacttcattggaataagaagaaagggcgcgtttgaaagcataaggtaagatgacattcgctgtttgtagcggtgacatacctaaagcttggcaggattgccattgtccagcaggtatcgccctgactgcaccgtggaaaaggagtgttgaataagccgcactatttaatgctaatgtcaccatggcgcaaaaccaaggtgtggataataattcccacaacagaggaaattcttttaatgaggggaattgtccgggtccataatagattaagaaaaattgtactaacaaaggtgtgccagtaaacaatgtaatatagacttttacgataggtgaaataacagggacttttaatgccaaaataaaagtcattaataccgataacgtaaaggcgactaagagcgcaacaaaagtcagtgataaactggtcggtaagcctggtaaaatatcaacaatataatcccacattatgaggcactccgttcaaatcgggtcgttctcatctctaaccatttcagaatatattggctgactaatgtaatggctaaatagataagtgccacaatgctataccaagtaaaaggctcttgagtacgattggcaatactctgggtttgtagcattaaatcattaacgctaattaatgagactaaagcggtatcttttaagagcactaaccactgattaccgagtccgggtaacgcgtgacgccacatttggggcatgataaagcggaaaaaaatggtgatttttcccatacccaatgcctgtcctgcttcccactgtccggttggcacggcttttaatgcaccacgtaaagtttgtgaagcgtaagacgcatacagaagtgaaagggcgataacaccacaatagaaaggtaaagattcagtatcaccaaagtcaaattgtaaggtgaaagggcctaattcaataccatccatgagcatcatgacaccttgtaaggtgccataatagacaaaaagaaccaccagcatttctggcagtcctctaattagtgttacccagcaagttcctagaaaagcaaaggctttccactttgcggattcccacgcagtaaacagcatggctagaactaatccgataataagagcagaaatagcaagtgtgaccgtagtcacggtcgcacctgctagcgttgttatttcattcatttattaagctattgttgttattaactataattattcaaaccattttttataaatgacatcataggtgccatcggcttttacttcagataatgctttgtttaatttatcttgtaaatcagcattaccttttcttactgcaatagcaaggcctgtaccaaaatagttaggatcagtgaccttatcaccgacaatgcctaattcaggattctttttcagccattcattaaccacagcggtatcaccaaagatagcctcgatacgaccattttttaggtctaacacggcattttggtaactgtcataaggcaccgttttcatctctttatgttgttcattgatgaatttctgatgggttgtcccattttggacaccaatttgcttgccttttaagcttgcaacatcggaaattttacctgtaacggtgataaagaccgctgagttgtcatagtaagaatcagtaaaatctacctgtttttgacgctcaggcgtaatatcaatccccgccattaatgcgtcaaaacgacggaattttaagctaggaattaagctatcaaatgattgattggtaaaagtacattcagcattaattttttcacacatggcatttgctaaatctacatcaaaaccaacgatttgattgtttgcatcaatcatttcaaatggaggataagttgcctcagtagcaaaacgaatagtctctttatcagccgctgttgcagaaagtgtaatactggtcagaagtgctgcaaataatatttttttcattgtcagatcccgatttagtgtgacaagtaattagcaaaagcttccgtttgaggggcagtgaaatgatgattatcaccttgctctataatacggccgttttccatatatacaactttgcttgcggctttgcgcgcaatttcaacttcatgggtcacaataacttgtgtgatccctgtttcagaaagctcttttatgatatcaacaacttgagccgtaatttctggatcaagtgctgccgttggttcatcaaataacagtacctgaggctccatcattaatgctcttgcaatggcaacacgttgctgttgtccaccggataaatgcagtggaaaacgttgtgcataatcacttaaacgtaaacgctcaagtaatttcatcgctttttctttagcttgcggttttgccaaacctaatacacgacaaggtgcttcaattaaattatcaagaaccgttaagtgtggccataaattatattgctgaaaaaccatgccaacattttggcgtaatgtacgaatcgctttcgcattcggttgctggccaaaatcaaaatgtagaccagcaatgtctaattcaccagaacgaggcatttctaataagtttagaacccgcattagagagctcttacccgcaccacttggtcctaacagaaccattgtttcaccagcagaacattctagattaatatcatagagtgcttggtgcgaaccgtagaaacaatttatattttttaattgaatactcatgcgttttttttgaatagtcattaactgtttcaaatgataaaacgatgagaataattatgcaactaatagtgcataaaaaattgctttttttacttaaaaatggatattaggacgattgctcgggctttttaggtgaatttttatccaatctataggcgcaagttgagacggtttgagccatacctttaaaaataaataaatgggctggcatcatggcaaaccaatagagtaaaccactaaaaccagcaggatgccaccaagcacggacatctaatgagcgtaggttaccactatcgtgaatagtaaaagagaggcgccctaaaccgggggctttcataccgaagagtaaagtcagttgtttttcaggctctaactttattacccgccaaccatcaatcatatcacctagcgctagcgtttcacgctgagggcgcccataagtgactttgttgccaacaagatcatctaataaagcacgtgttttccataatgcattaccataaaaataaccttgttcaccaccaatttgctgaacgacatgccaaagtgccgccgcactcgctggtgttgacactgtacatccggcatttttgggataatagccatagccgggtttccaacggttacgtacttcaggagagtaaccccaatcttgatcatctaaagccgcttcttcatctgcgagtgtttctctgactgcgtcatcaaaagaaattaacttttgtgggatcagcttgcgtaaagaggcatctttagcgggaagatcgtatttaagcccttggataagctccttggcgattgaagtgggaactgaagttattagactaataaacccagcagaaataatactggcggggataggtaaagggatcagtaatcgttttttgccggagatgttaataaagcgctcaaaaagtgtttgatagctaatatattcagggccaccggcatcaaaaatgcggtgttgatgggttgggtgatgaataatttctgttaaatagtaaattaaattttttaacgcaataggggatgattttgaacgcacccaacgtggcggggttaatatcggtaagttatataccatatctcgcatgatctcaaaagcggccgagccggggccgacaatcatagaggtgcggatttccgtcacaggaatagagctggttctaagcacttctcccgtgagcttgcgggcaacaagatggggagagtagggttgatctttatgttggagcgcacttaaaaaaataatttgtttaacgtcactctcttctaaagcatcgacgacgttcaatgccgcttggcgctcttgttcgataaggttatgggcatctcccatactgtgcacaaggtaatacacaatatccgtattacggatgacatctcgtaatgttttgggatcgtgtaaatcaacaaatacacagcgtgtattttgccacccttgcgacatcatccaatcgactctacgagcaccggcggtgacttgatggccttgtgctattaaggcaggaataagattttgtccaatatgtccactggcacctaataccaatacacgctgttgattcatcgttaacccactgtaagaaaagacgtaataatactattgttacaaaattttctatgaagtaaagaacgccattaagattggtgtgaccaaacttaatacgaaaccatgcacaattgcagcaggaactatggcaacccctccactgcgttgtaatacaggtagcgtaaagtccatagaagttgaaccacaaatacctaatgccgtatttctataacgattaacaataatggggattagcatgatggcggctaattcacgcattaagtcattaaagaaagcggtactaccaattaccgggccaaacgcatcggttaatacgatccccgataaagaataccaaccataaccagaggctatcgctaatcccatttttgtgggtaatccgagtaaataagccgctaatgcaccacctgcaagggcacttattgccatcactattgcaatggtagtaccgcgacgattaattaagatctgctttggactcatgccactattacgtaattgtagaccaacaagccataataaaaagataagtgcgccttggctggcttgagatgcataaccaaaaattgaccatccggttaaaccgacaaaaaaacctactaccactacaccacaaagttgtagtgattcgagtaccattttgatacgtgaagggggcttagcttgtttatgtgcagggacatgccagggatcttttttatccagcaaccataaaaacagcagattggcaccaaaagtacagataaagaagacactggcataggcaaggatagaaaataaattttcaccaatattatctaacatggctaagctaacccccattaaaaagaggatcacatagaccattgcactaagtaaacggttagccaattgaagcaaagggcgattgtttaacttaatcaaataccctataaacaggggcaataggataatcaataaccctgatagcatttctattccttactgagtgttgtcaaaattataaaataaactaataacgcgaattgcattataacatttgctaatagttatgtggatatagaaaccgcgataagttgaaaatttttattacagaagaagagcctagcacgatctgattaatatagccttaattgtttgaaaaatgagctaattagttatgtgtcgaatagttgagtaaattttattacgctcatgaggaactgtgttttaataaaaataagtcattaagtaaaattattatcagaaagcgtataaagttgatagagatgcaatagatgaaccataacaactgagttgcgacctgagagggaatttatgtatttagaaagagtggaaatagcaggatttcgggggcttaatcgcctttctctcccccttgatatgaatacggttttggttggcgaaaatgcatggggtaaaacttcattacttgatgcgttaaccttgagtttggggatcgaaacttatcaatatgcttttacagcagaagattttcatcgtttacctaatgagccagaaaacagtaaaaaaaacctacaaattattctgacttttaccgaatcacgtcctggtcgtcatcgctcgtatcgttttcgtaaattagcacccgtatggatagctaatggggacgctcgtaagcatatttattaccgtattagtgcagaattagatgagcagcaaaatgtcaaaacctttcgttattttctggataaagaaggtaaacagatccgtttagcgaatggacagaccaaagcgattattgctgaaattgtgcgcctttatccagtattgcgcttacaggatgcgcgttttatacctaatttaacaacagaagttattgactctcataatgagcctcatcgtgaagcatttaataataagatgagtgaattaacgaaagcattaattaataacccagacaatttatcagatgaagatttacgtgaagggttagatgcaatgcaacagttattaggacactattttgctgatcacggtgcgctactgtttaaatctcatttgaaacatcgcaaagtcagtgagccacatattcgaggatggcatgcactagaaaatattaataagattttagcgaaacctaatcagcgcaatattcgtttaattattttaggtatgttctcttctattttacagtcacgaggcagtgtcgaacttgatccttacgcaagaccgatagtgattgtagaaaaccctgaaactcgcttacaccctattatgctttctgtggcatggggattattaaatctcttttctttgcaacgcattacgacaaccaattcaggggagttactctccttagcaccactacaaagtgtttgtcgattagtacgtgatacagataaagttgccgcttatcgacttggcgacaaacaacttcatgcagaagaagagcgtcgtatctcttttcatattcgttataaccgaccttctgcactctttgctcgttgttggttattggtcgaaggggaaacggaaatctggctaatgaacgaattagccagacaatgtaactacttctttgaatctgaagggatcaaagtcattgagtttgcgcagtgcggacttaagccactgttaaagtatgctacctatatgggtatagaatggcatacgttggttgatggcgatgaggcgggtaaaaaatacgccgccaccgttaaagaatttgccgcaaaaagaaatgatgcggagcgtgaccgattaacacggttgccagcattagatatggaacactatttatataaagaaggttttcgcaatgtctatcatgaggttgctggtgttcctgataatgaaaaatggccagtaagacgtgtgatcataaaagcgatacaacgttcatcaaagcctgatcttgccttaacggttgctaataatgctgcacaacgaggtattgatgctattcctactttattaaaggtgatgttttctcgggtagcatggcttgcgagaggaaaagccaattaagtcatttttctatgcttctatttataggggcatagatatctcattgtgtttttattatcgaaaaagttaagggtgattttaggttattaccaacaggactttattttttatttcactcttattgtataagaaggatatttcatggcttttttcctaactaaaaagcaagggaagattatagctgctattttgatttttattgccataggcttattttttttctggccgaaagagcatttacctagttatcaaacacaaaaaattactcgtggggagctttccaaagaagtcacagcaacgggcaaattagatgcggtacgtaaagtcgatgttggtgcgcaggtgagtggtcagctacaaactttatatgtaaaagaaggggatgtagtaaaaaaaggcgatctgctggcgattattgatccgaaaaaagcacaaaatgaggtcgcggaatctcaagaaactaataatgaactgatggctaatttacagcaagctaaagccgaattacgtttggcgcaattgacttatcaacgtcaattaaagctgattggcacacatgttatagcccaagaagagcttgatcgcactaaaacagacgttgaagtcaaaaaagcccgagtggcgacttatgaagcacaaattagaaaaaatcaggcaacactggataccgcaagaactaatttgcaatatacccgtattactgcgccgatggatggtgtggtcacttttatcaaaacccttgaagggcagacagtcattgcagctcaagaagcaccaaccatattaacattagctgatttagataccatgttagtaaaagccgaagtttctgaggcagatgttatctatttaaaacctgatctcaaagcctcttttactgtattaggagcaccagataaagccttcaatggtaagttaaaagatattttacccacacctgaaaaaatcaatgatgcgattttttactatgcacgttttgaagtccccaatgaacaacatttgttgcgtttacaaatgacagcacaagttaaaattctccttgagcataaaaaagatattctcttagtgccattgtcagcattaggggaaaatgtaggcataaatgaatatcaagtagaggttctcgtcaatgggcagcctgaaaaacgcgtagttaaaatcggtattcgtacagatgtttatgcagaagtcattagtggattaaatgaaaatgatgacgtgatcctcggtgagattgcaggagagtcataatgtctgcattactagagctcaacaacgtaagccgtttatataccaatggtgaagaagacacggtggtactagatcagatttcactgacgattaatgctggtgaaatggtcgcgattattggtgcatcaggctctgggaaatcaacgctaatgaacatattaggttgcctagataagccaagcagcggtgaatataaagtggctgggcaatgtgtggcagatatggaaagtgaccaactggctgcgctacgtcgtgaacattttggctttatttttcaacgctaccatttgatggcgcatttaactgctgagcaaaatgtggagatccccgccatatatgcaggtaaaagtacagagcaaagaaaagagcgcgcccgtgcgctattaactcgccttggtttagcagagcgtattcactatcggccaagtcagctttccggaggtcaacagcaaagagtcagtattgcccgcgcattaatgaatggcggagaagtgatcctcgccgatgagccaacgggggcattagatagccaatcgggtaaagaggtaatggctatcttaaagcaattaaatcaacaagggcatacggtgattattgtcactcacgatccattaattgcccaacaagccgatcgtattattgaaattaaagatggtcaaattattagcgataataataatcaccattctgcaccagtgaaaaaggcaccacctgcgatccaaaccgcctcttattttcatcaagtcattggacgttttacgcaggcattaaacatggcttggcgagcaatggtggtgaataaaattcgtaccttgctgacaatgttggggatcattattggcattgcctctgttgtcaccattattgttattggtgatgctgccaaagatagggtcttagcagatataaaagcgattggcgccaataccattgatatctatccgggtaaggagcttggtagtgattcaccagaagataaacaatccttaaccattcaagatgttgatgcgttaaaacagcaatcttatatacaatcagtgacaccacagatttactttagctctcgattacgtcgtggtaatcaagatgcgccggcaacagtttctggtgttaacgaggattatttttcagtgtatgcgttgaaatttgcacaggggagcacttttacgcctgatatgatccatcgccaagcgcaagtagtcgttattgatgaaaatactcgtcatcgttttttcccgaataaacaagcggtgattggcgagcaaattattattcgtaatattccttctactatcataggtgtggttgcagagcaaaaatccacttttggtgataataagtcattacgtgtctgggtgccttacagtacgctaagtagtcgaatttataaccgtagttatttagataacatcacggtaaaagtaaaagagggctatgatgcgagtgttgctgagcaacaaattctccgcttattaacgatccggcatggtaaaaaagatatttttacttataacattgatagctttattaaagcggctgaaaaaaccacgcaaactatgcaactgtttttaaccttggtagcggttatttcgctggtggtaggggggattggcgtgatgaatatcatgttggtttctgttacggaaaggactcgggaaattggtattcgtatggcggtaggcgcacgagccagtgatgttatgcaacaatttttaattgagtcagtactggtgtgtttggtgggaggattattaggtattagcctttcatttgcgattgctatgtttgccagcatgatgctacccaattggcattttgtgttccagcccacggcactgataagtgcttttgcttgctctacagcaattggggttatttttggttttttaccggcgagaaatgcggccaaaatgaaccctattgatgccttagcgagagagtaaaatagcggtagtctataaaagatcaaaagccctatctttcaaaagataagggcttttattggtatgataatgtgagcgtcattttctgtttaaagtgtgaaaatggacgaaataaggggcgagagcggataaaatattatccacatcatacttacttaaccattattcgataataggaatgataagatcagcatgatcccctttaggtccttttattgtgctataattaactttctgacccgctttcagtgtgcggtagccttccattcttattgatgaataatgggcaaaaatatcttcgccacctgcggcaggggtaatgaaaccaaaacccttagcgttgttaaaccacttaactgtacctgtctccatacttagcttctctcatatacttgtctttatttacttaacattactttcagtatatttactgagctgttcataaaacatactctaattaattgtttcaatcgtcaagggggagatgagcaagaaaatgttccgagtaggtgaaactttgatgtagctaacgctttgttatttattttggtagaaaaagagttaataaaaaaccgttgataggcagactttcctatgagatggtaaactgaatgtcatagtgagtcgtgacgtttaacaaaccaatgagtaacacataacaatgggtcagtttgattttttaacagaaaccacactaggggagaaggtctctcagttaaatgagccacctgcgatgtataaggtgatcttgaataatgatgattacacccccatggattttgttgtagaagtattaacaatgtatttttttcttaacgaagaaaaagccacacaaattatgttggacgttcatcataaagggaagggagtgtgtggtgtctatagtgcggatatcgctgaaactaaagttgcacaagtgaatcaatacgccagagaaaatggccatccacttttgtgtacactggaaaaagcgtagtccggtgagtcttttaaggaggaggtgcttatgcttaatcacgaattagagcttagtcttaacattgcattcgcgaaagcccgtgataacagacacgaatttatgactgtagagcacctgttgctggcgctattaagtaacaaatcggcgcgtgaagcattggaagcttgtaaagtcgatttagcagtcttacgcgaagagcttgaaatctttattcgtaaaacgacacctattttacccgagcatgtcgatagagaaacacagccaaccttgagtttccaacgtgtattacaacgtgctgtgttccatgtgcaatcttcaggtaaaaatgaagtttccggtgccaatgtgctagtggcgatttttagtgagcaagagtctcacgccgcttatctactacgtaaacatgatgttagccgtcttgatgtggttaattttatctctcatggcattttaaaagatgatcaacaaaacagtgatgatcagtctgatatgggcgatataaatgcacaatctcaacaagagatgccacaaggcgatgatcgcatggataattttaccactaacttaaaccagttggcgcgtcagggtaaaattgatccacttatcggccgtcaagcggaattagaaagaacgatacaagtcttatgtcgtcgacgtaaaaataatccattactggtcggtgaatcgggtgtcggtaaaacggcaattgcagaagggctcgcatggcgtattgaacaaaatgatgtgcctgatgtgatgaaaggctgcacgctctattctcttgatattggatctttattagcaggaaccaaatatcgtggtgatttcgaaaaacgctttaaagcgttattgaaaacacttgaaaaagatgaaaaaagtatcttatttatcgatgaaattcataccatcattggtgctggcgccgcctctggtgggcaagttgatgccgctaacttaattaaaccactattatcaagtggtcgtattcgtgtgattggttcaaccacttatcaagaatttagtcagatctttgaaaaagatcgcgccttggctcgtcgtttccaaaaaattgatgtaattgagccttcggcagatgaaaccgtattaattattaagggattgcgtcagaagtatgaagcacatcacgatgtgcgttataccaataaggcaattcaggcagctgttgatttatcggttaaatacattactgatagacaccttcctgataaagccattgatgttattgatgaagccggtgcgaaaacccgtttaattgcaccaagtaaacgtaaaaagacgattaatgtctctgatattgaatcggtagtagcaaaaattgcccgtattccagaaaaaacggtttctagcagtgataagtcaatgctaaaaaatctggataaccaattaaaaatgttggtgttcggtcaagatcaagctattcatgccttggctgaatctatcaaaatgagccgagcaggtttagggcaagagaataagccggttggctctttcttattcgccggacctactggggtgggtaaaacagaagtaacggtccagttggcgaaagcgcttaatattaagctactgcgctttgatatgtctgaatatatggaacgacatacggtaagtcgtttaattggggcacctcctggttatgttggttttgatcaaggtggattactcacagatgcggtgattaaaaacccttattctgtagtgttacttgatgagattgaaaaagcacatcccgatgtgtttaacattctgctacaagtgatggataacggaacacttactgataataatggccgtaaagctgattttcgtaatgtgattttggtgatgacaaccaatgcgggtgttcatgaaacgcaacgtaaatcgatagggtttactgaacaagatcatagcactgatgccatggttgaaatcaaaaaagcgttttccccagagtttcgtaaccgtttagatggcattatttggtttaatgcgctatcagccgatattattgctatggtggttgataaatttattgtcgagttacaagctcaattggatgataaaggggtatcgctagaggtaagtcaagaagctcgccaatggttaagtgataaaggttacgataaagcaatgggagcaagacctatggctcgcgtaattcaagaaaatctgaaaaaaccattagccaatgaaattctgtttggctcgttagttaatggcggctcggtttctgtgaccttaaatgaccaagaaaataaattacagtaccaatttactagccaagaaaaattggctaaaaaagaagataccgttatttaataatagcggtttatcttaggctaaaaagcagacaccacaggtcagcatcaattcatgctttgcctgtggtgttttttttcacccgaaatgatgatattgcgggagagaatggattgggatcaacggctacggaagatgatacggcctttgctcaggtcatatggggtcagctcaacggtaaccttgtcgcctgtcaggatacgaatatagtttttacgcatttttcctgaaatatgagcggtaacgacgtgtccgttttctaattctacacggaacatcgtgtttggcagagtatccagtacagtgccttgcatttcaatgttgtcttctttggccatctaatcctctaagttttaataaccatattttttaaacggcaagataatgccgaaaatattgtcctatgtaaaggaatgttattggttaacaaagatgtttgctttgctaacaagttaatattccttaccgttacttgtgttttagttgctgaaaaacaaggttaataacacaagtcataattctttattgtgcggtatttattgcaataaaataacaacatccaaaccacactttggatgtgcaagatgaatttttgtatagaccacagcagtgaaattctatttaaaatctgatgggctttacaaaaacgagtggtgattataattccaacgattgctgataccaacactttttatcaataatcacctttttccaacgagatagcgcctctaaatagcgatctctggcaatttctatcgcacctaatgctgccgtatgagagtttaacacttggcaatcaaatagttgacccccataacgcagaaaatggttataaaaagcaacaaaggcacatttagaagcattatttcgacgactaaacattgattcaccgcagaaaacggcaccaacgttaactccatataaaccaccgatcaattcgtcgccctcccaaacttctacagaatgggcttctccttgttggtgcaatgcccgatagccggtttttatatcagggcctatccaagttccctcatcacgtacactacaggcctcaatgacatcagagaatgcctgatttaaggtgatggtataaggcgcttggcgtaaaaacttacgtaacgtacgaccaatatgcaatgttcctgcgggtaagacggctcggggatcgggtgaccaccataacggcgtttcatggggtgtataccaagggaaaatccccgtttgataagcctctttcaaacgagcaggggaaatatcgccgccaattgccaataacccacttggctcttttaaagccaaatggggggcaggaaaagtcacatcgtgttcatctaattgaaacaacggcatattacgcctcatcatgtggcattaacaatgcttgtctttgatgaaatttagcatactgaccttgctgttgtaataactgacgatgcgtgccggtttcgacaatgtgaccgccatccatcacacaaattttatccattttatctaacccagaaagccggtgggtgatcattaataccgctttgccttggcaatgttgctgtaatagtgcgaggatctgttgctctgtatctgcatcaagaccttctgttggctcatcaagtaagataagtggtgcattatggagtatggctcttgccagccctaaacgtcgttgttcgcctccagaaagctgtcttccaccatcacccatccatgcatttaaaccttcatcattttcgaccagttgttcaagaccaacttggcgtagaacatgagtaagctcttcatctgtcgcatcttcttttgccataattaagttctctcttaaagtatggctaaaaacatgcacacgttgaggtacaacagacatcattgaacgtaatgtcgcttcatcataatcagcaagagataaatgatttaatgtgatcacgccctgagagggatcgaatgcgcgattgactaattgtaagagtgttgatttaccacaacccgttttacccagtaatgccacatgttgtcctgcttcaatggtgagatcaacatgattgatcacaggcatgggttgattaggataggtaaagcagacatcccgtagtgttaatgaggcgctcggttttatctctcccccttgggctgggaaggtgacatcgggttgttgctcaattaaatgcgtaatacgcgtagccgatgtcatgacttgccctaaatgttgaaatgcgacagtcaccgggccgagcgattcaaatgccgctaatgcacagaaagtaaagagagcgatgagtgcttctggcataaagtgggcatcaataccatcggcagctaaccataaaatcagtgtggcggttaatcccgaggccaaaatcattagcgattgagataaaccagttaagttagcttgttgtgcttgacggcgcagccagcgtgcttcaagttgtgctaaattttgtctaaagcggggaagggcgccaaaaattgttaattcagcttgcccttgtaacatactggtgagtacggtgcgatattgccctcttaggtctgtgagatcacgaccaatgggctttccggcataataaaatacaaaaggtaataccaccagcagggtgagcataataccacctagcgtatttgctaagtgagcatcaataagcccaagcccaaacataatggtcatgataaccacaaaggcggcaattatcggtgagatcacccggatataaaggtgatctaaggtttcaacatcagctactaaacggttaagtaattcaccttgacgaaaacgggcgatccccccaggagagagcggtaaaattttcttaaaagtgaaaacacgcaagtgtgagagtacacgaaaggtggcatcatgactgacaagacgctcaaaataacgccccgcagtacgaaatattgccgcacctcgtaccccagcggcgggtaacatatagttaaaactataaatgcccgcaaaacccgctaatgacgtgcccgctaagaaccagccagaaagtgttaaaaggccgatactggctaataatgttaaaattgccaacaaaatacccagtaacagcataaaccagtgacgacggtataacgcgagaaaaggaagcagtactctcatgatcaaagttcctctttacgatgagcaagaagacgagcaaaggcaccatgttgttgactgagtgactgataagtcccagtttcaatgatttgccctttttccattacccaaatctgatcatattccatcgtttcttctaataagtgggtaatcaacagcgtcgtttgatgtaatgaagcttcattaagcgcttgcataacgcgctgttcactgtgagagtctaaacttgctgcaggctcatctaataataaaaagtgacaaggtgataaaagggcgcgagctaccgcaatacgttgggcttgaccaacggaaagacgggcagcattatcaccaataatggtgtttaaaccatccggtaattcgttaataaaatcacttacataagctttttcaatagcttgatttatcttcgcttcactggcgttcggatcacttaaacgaatattatccagcagggtttgctctggtaagttagggttttgtcccacccagctgatacattggcgccatgcctgtggagagagttgagttaactcaacaccattgacggttaatgagccacgataaggtaaaaaacctaacaatacattaagtaatgaactcttacctgcgccactttgcccgaccagtgcaatacgctgtatgggatgaatggtaaagttaagagggcctgccagtttggctccttgatgtgacaagatttctaattgttgggcaactatttcaataccttggtcggtattaatagtttgattacccgtaggttggggctgttcaccttcggcttctaaaaactcaaccaaagagccagctgcacctaccgcctgtgctttagcatgataataggtgcctaagtcgcgtaatggttggaaaaactcaggggcaaggatcagggctaaaaaaccagaaaataacgtcacgcctaacccataatcaccaaagctcaattctccaagataggaaaaaccaaaatagaccgcgacgaccgcaatggatacggcggtaaagaattctaatacgccagaagagagaaatgccatacgtagcacttccatggttcgcttacgaaagtcttccgttgcatccgttatctgttttacttctgcatcaccacggttgaataggcgcaatgtatccaaaccacgtaatctatcaaggaagttgccacttaagcgacctaaggcaagaaaattacgccggttagcatctgctgcgcctaagccaactaacgccataaataaaggaataagaggggctgtgacaaaaagaattaatcctgcggcccaattaataggaaaaatggtaataagaatcagcaaaggtacaatagaggcgagatacatttgcggcagataacgcgcatagtaatcttgcatatcttctatttgttctagaataatcgttgcccaacttcctgcgggcttgcctttgacccatacagggcctagcgcttcaagtctatcaagtactattttgcgaatttgctgtctgaccgccataccacagcgatagcctacacgttcgcgtatcgccatcacgacagcgcgtaaaataaagatgctgataaggataaggaaagtagtcgtatgtgtatcacgacttagcccatccataatgaacgcttgtagtagaatggctaataaccatgcttgcgcaataattaataaaccactgactacccctaaaatcattgatagccgtaaccaacggcgggctggagcactttgctgtttcagccatcgaaccaattcattttgtttagttttatccatgagaaaagattcaaatctgcaggtgagatacaaagtatcaaaaacgccaagaataataatgattactctttaacgaccaagctagtatgttacatggtaaaaggcgctactgaaatagcgccttgaaaggaagtgaggattttagttagattttagtgcgtctaagtaacgttctgcatctaaagcagccatacaacctgtaccagctgaggtaatggcttgacgataaatatgatccattacatcacctgcggcaaaaacaccttcaatagatgtttgggtagcattgccttgcgtaccggattgaactttaatgtaaccgttatctaaggctaattgatcttcaaaaattgccgtgttagggctatgaccaatagcaataaagacgcccatgacctctagctcttcggttttatcacttttcgtatcttttaagcgcactttagtgacacccatatcatcacctaacacttcatctaaggtacgatcggtatgcaaaatgatattgccattcttaactttgtccattaaacggtcaattaagattttttcagagcggaatgaatcgcggcggtggattaggtgcacttctgaggcgatatttgctaaatacagtgcttcttctacggcagtattaccaccaccgacaacagcaactttctggttacgatagaaaaagccatcacaggttgcacaggcagaaacaccacggcctttaaatgcttcttcagaaggtaaaccgatataacgtgctgatgcccctgttgcaatgatcaaggcatcacaagtatattcttgttcatcaccaaataggcggaaaggtcggtttttcagatcgactttgttgatatggtcagagataatctcggtattaaatttttcagcgtgctgaaacatgcgatccattaaaccaggaccagttaatccttcagggtcgccaggccagttttcaacttcagttgtggtagtgagctgtcctcctttttcaacacccgtaatcagcacgggttctaggttagctcgtgctgcataaactgctgcagtatagccggcaggacctgaacctaaaataataagtttgctatgtttgatggtgctcatggatacctcatctttgattaggcttgatgcgaattgagcgattgtaggagaaataagacgttaaaaaaagccaagaaagggaaatagcgataatattttaactattttagcaatagttaatagtaatatagtttaataattatagagttatattgcgttaacatcatcgaattaacctgaaacattttgctttacaattgctgtttatcttgcatatatagacaataacatagcgccttgttctgatttttgctcatttgctttgacaatccgctgtacatttgcgaaaacatgactgtaaaagataattatcctcagacgtaataggtattatttttagacagacagggcataggatagtgcttttgcaagatgaatagataagaatttggataaaatgattgttttatctggcattaaataaaaatagattggtagtttgctctgaccgtttgataccgaggtctcaatatgatgctgaaggtgtacaggtatgggtataggaaaataaagtaagagaaaaagagaaagagagtatagagatgattgataataaaaaacgtccgggtaaagatcttgatagaatagaccggaatattctaaatgagcttcagaaagatggtcgtatctcaaacgttgagctgtctaaacgcgttggtttatcaccaaccccatgtttagagcgtgtacgccgattagaacgccaaggatttatttctggttatactgcgctattaaacccccattacctagatgcatctctgttggtatttgtggaaatcacattaaaccgtggtgcaccagatgtctttgaacaatttaatatggctgttcaaaaacttgaagagatccaagaatgtcatttagtttctggtgactttgactatctgttgaaaactcgtgtacctgatatgtctgcttatcgtaaattattaggcgaaacgctattacgtcttcctggtgtaaacgacacccgcacttatgtggtgatggaagaagtaaaacaaagcaatcgcctagtgattaaaacacgctaagcctgctaataggttagtgcaaaacaggataaagttaggtacactcctgtttatgtatacagtttcaacgctgggttatctcagcgttgttccgtttaaaccttaagtgaaacctggagagccctctttgagccaggaatatacagaagataaaaatattcgttttactaagataagtaaccgccgtcgtatttgggaagcccttcttattttgataggcattggtgctatctttttaatgatttctttactgagcttccatccagccgatccgagttggtcacaaaccacgtggaatgaacctattcaaaacttaggtggcaatattggtgcatggcttgctgatatccttttttcagcatttggcttgctcgcttatgcaatccctattgtggtggtatttggttgctggaatgcattacgtcatcaaaaaaatcgtgaatacacagattttttctcccttgcattacgtacaattggtgccttggctctggttcttacatcttgtgcgttagctgatcttaattttgatgatatctacaattttagctctggtggggtgattggtagcttatttagcaaggcattgctaccttggtttaatatgctaggtgcaacactggcgctactatcagtatgggcgataggctttacgctatttactggctggtcatggctgacgattaccgaaaagattggtgcggttatcttaggtgcggttgcttttattactaatcgtggtcaaaaagatattgactatgatgattatgaagaacccgccgatcctattcaggcagatcccgaggtgctggtggataacaacacccagccagaacatcaactttctgcgcaaatagaaccagatagtgatgatattctcttttctgcaccttccgcccttgagttagcgcgtcagcaagaaatggcgatcacgccacaacatgatgatataactgaaacttcagaagttgctagcggatctgcaaccccaacgatttcagccacagagacagttatcgctgaggcgcacgagagcaaagagcgggcagagcatattgttgataatcaacaaccgacgcatgccacaacccatgatgcagaagtaacaccgccatccattatggctactcatgacgctagcccagtcactgagcctgaacctgaacactatcgctttgaaataccatcggcatttcttaagcaacaagcgcattcctctgattctatggcagacaatagtgtcgtgacagaagaagtaccgacaaccatgccactgacggaaaacaaacctattgagacaaacgaagcgccaattgtctcgcaaaaaacagcggcggataatagcgaccatagtgcatcattatttacgccatcatttacgccatctgctacatcaacagatagcaattcagcttcattaactcaaacagccgccggtgttgccagtgtggcaacagcagcaatagtcagtcacggtgcacaagttaaacaaggattagggcctgaattacctcgaccaaatcctgtacgattaccaacgcgtcgagagctttatggtattcgtatcccatcacaacgtgaggcggaattacgccgccgtgaagaagcgcttcaacaagatcatgaagacgatttagcggatatacaagagcaggctaatttcgaacaatcgttacgtcagcaatttcttgagcaacaacgtgagcgctatggtgaggatacatcagcaacacaaaatgttgagccaaccatcacgatgtcatcagcgacatctagctcgcagtcaacctatgacgagtatgacgagtctgataatcaacctttcattgatacccataccttttctgcgcaagaaacagaagaggagagtgatgagtatgaacaacacctcgctgagcagtttaagcaacaactgcaagaacgttacggtgaggatgttttacaggatgaagatgacgaggtattgccatcagtcacgactggagcatccgagacgtcagcctcggcacaagggtatcatccccatattcagcactcttttgcgtctcaatctacccctgttactcaacagactgataacagcactctttatcctaacagtgatgcattcttacaagtatcacctcgtgatgatgaagaagaggaatacacaccgactatcgagttacaagaaaatcttgatgcattaggctcgttatcaccggtggatgatttgttagatgaagagcctgcagagcctgtttttacgccgatggtaacccctgcagagccagtatcttctgtatcttctgtagggcaaacacctattgagcctcaagcacagatggctcaacattttgcacagcaacagcaacagcaacagcaacagcaacagcaacagcaacagcaacagtcattaattcatccgttattaatgcgcaatgataggccgttacaaaaaccgacaacaccaatgccatcacttgacttattaacctctcctcctatggatgatgaacctgttgatatgtttgagcttgagcgtattggtaagttaattgaagcgcgtttaaatgactaccgtgttaaagcaaaagtggttggtatttcaccgggcccggtgatcacccgttttgagctagagctagcgcctggtgtaaaagctgcacgtatttcaaatctatcccgcgacttagcacgttcactttccacgacggcagtgcgtattgttgaagttataccgggcaaaccttatgttgggcttgagttaccaaacaaaaaacgccaaaccgtctatatgcgtgaactattagatagtgatgcattccgtgacagtcgttcaccattaactgtggtattagggaaagatatcggtgggcaacctgtggttgctaacttggctaaaatgcctcacttactggttgctggtactacaggttcgggtaaatctgttggggtgaatgcgatgatcatcagcattctctataaagcgaagccagaagatgtacgctttattatgattgacccgaaaatgttggaattatcggtttatgaaggtattccgcatctgttaaccgaagtggtcacagatatgaaagatgctgcgagtgctttgcgctggagtgtcgcagaaatggaacgccgttataaattaatgtccgcattaggggtacgtaaccttgcgggctataacgaaaaaattaaagaagcggaagccatggggcgtccaattccagatccactatggaaaccttctgacagcatggcacctgagttgcctatgttagaaaaagagccttatattgtggtcatcgtcgatgagtttgctgatctaatgatgaccgcgggtaaaaaagtggaagaattaattgctcgcttagcacagaaagcacgtgcggcgggaattcacttagtattagccactcagcgcccttcagtggatattattactggtttaattaaagcgaatattccaagtcgcatcgcatttaccgtatcgagtaaaatcgactcgcgcactattttagaccaaggtggtgccgaatccttgttaggtatgggtgatatgctttatgcccctaatggctatatgccagagcgtgtacatggtgcatttgtcagcgatgatgaagtacatgcggttgcaacagactggaaagcacgtggccgacctcaatatattgaagccattaccaaatgtggtgaagaaggcgaaggtggcaatggtggtggttatgatgatggtgaagagcttgatccgctatttgatcaggccgtagaatttgtggttgaaaaacagcgagtctccatttccggtgtacagcgtcaatttagaataggctataaccgtgcagctagaattgttgagcagatggagatgcagggtattgtcagtgcacctaatcacaataatacgcgtgatgtattatcaccaccgccagcagaaatgtaatatcttgaaaacagagttatcagcgcttaaatcagcatgataatctaataaatatcactataacttatacgccgacatgatgtcggcgtaatctcagtcagaggcgtgttgaatgaaaaaagtattactcacagtctgtgctatcgcgttgtttggtagccaagccgcttgggcggatgctcgtcaagacttacaacaacgtcttaataaagtgaatagctttcaggctaactttagtcaaacggtgaccagtaacgaaggtgcgttaattcaaaaaggggaaggacatttaaaagtacagcgtcctgatctgtttaattggcaaatgacggcaccggatgagagcacactaatttctgatggtaaaacattgtggttttataacccatttgtcgaacaagtgacggcaacttggttagagagtgccacaacgaataccccttttatgttgattgcgcgtaatgatagtaaagaatggcaaaattacgatgttaagcaaaatggtgatcgctttgaattaacccctaaaacagagaacaatttaaagcacttttctattaccgtttcacctaatggtcaaatccaacaatttgcggctacagagcaagatgggcaagtcagccaataccaattaacggcacaaaaggtcgcccccattgatgcatcagcgttccgctttacaccacccgcgggtgtgacggtggatgaccaacgctagtgaggctattttgagtaatttatcactcgacttttcacaaaatgaatttcaacctctggccgcgagaatgcggcctgaaacattagaacagtatattgggcagaagcatctactcgctgaaggtaaaccgctaccacgggcgataaaagcaggccaattgcattcaatgatcttatggggacctccgggtacaggaaaaaccacattagctgaaattatcgggcgctatgcccaagcggatatagaaagactttctgcggtgacgtcagggatcaaagagatcagggccgccattgacatagcgcaccaaaatagaaatgcggggcgtagaaccatcctatttgttgatgaagttcatcgttttaataaaagccaacaagacgcttttttgccacatattgaagatggcactatcacctttattggtgcaacaacggaaaacccttcttttgaattaaattcggcactgctatcacgtgcacgagtttacctgctacgctcattgacagaaacagacattgaacaggtattacagcaagcattagatgatactgaacgtggattaggtgggcgtaatattattttacctgataatacacgcaaaatgattgctgaattagtcaatggcgatgcgcgccgttcactcaacctgcttgaaatgatggctgatatggcagaagtcgatagccaaggcaaacgaacactaacagcggaattattaaaagaaattagtggtgaacgtagcgcccgttttgataataaaggtgatcgattttacgatcttatctctgctttgcataaatcagtacgtggctcggcacctgatgcagcactttattggtatgctcgtatcatcactgcggggggagatccactgtatgttgctcgtcgcttactggctattgcttcagaagatgtcggtaatgcagatcctcgtgctatgcaagttgccatcgctgcatgggattgctttacgcgggtaggccctgcagaaggtgaacgtgcgatagcacaagcgattgtttatcttgcttgtgcgccgaaaagtaatgctgtgtataccgcttataaagccgcactggcagatgcgaaaagtaaacctgattatgatgtacctgcacatttacgtaacgcgccaacgcaattaatgaaagagatgggcttaggtgcagagtatcgctatgctcatgatgaacctaatgcttatgcggcaggagaggtctattttcctgctgaaatggcacaaacgcgttattatcaccctgttaatcgagggttagagatcaagcttgctgagaaattagactggctttctcagcaagatcaaaatagtgtgacaaaacgctatcgcaaattgtaaagatgcggtaaggttattcaatcattagtaatttttttaactaccccttatctcaggtatcttcgcgataggtaaacaagagaatgataggagataaggtttttattaatctatcaataagcacaggataagcatgctcgatccaaatctactgcgtaatgagctagacgcggtcgccgaaaaactggctcgcagggggtttaccctcgatgtggaaaaaattcgtcaacaagaagaacgccgtaaggtgttacaggttgaaacagaatccctgcaagcagaacgtaattcccgatcgaagtctattggtgctgctaaagcgcgtggtgaagatattgagccacttcgtcaggaagttaaccaattaggtgaaaaacttgaagcggcaaaagcggaattagataaactgcaagccgacattcgtgactatgcgttaactttaccgaatctgcctcatgactctgtgcctaatggtaaagatgacagcgagaacgttgaagtatttcgttggggtgaaccaaagacttatgactttgaattaaaagatcacgttactctaggtgaacttacagatggtttagatttcccatctgccgtgaaaatcaccggttcacgttttgttgtgatgaaaggtcaaattgcacgtttacatcgcgcgatcgcccagttcatgctgaacttgcatacagaacaacatggctatcaagaaatgtatgtgccttatttagttaaccatgccactttatatggcacaggacagttacctaaattcagtggtgatttattccataccaaaccacttgaagaagagtctgaaagccaatatgcgctgatcccaacagcagaagtacctgttaccaatatggttagagacgttattctcgaagaagacgaactaccattgcgaatgactgcacatacgccatgtttccgctcagaagcgggctcttatggccgtgatacacgtggtctgatccgtatgcaccaatttgataaagtagagttagtacaaattgtacatcctgaaaaatcaatggatgcattagaagagctaactggccatgcagagaaagtgttgcaattgctcaatctgccttaccgtaaagtggtactttgtacaggtgatatgggctttggtgcacgtaaaacctatgacttagaagtgtgggtaccggcacaaaatacctaccgtgaaatttcttcatgctctaactgctgggatttccaagcacgccgtatgcaagcacgtttccgtgctaaaggtgacaagaaaactcaacttgtgcacactttaaatggttcaggtttagctgtagggcgtactttagtcgccattatggaaaactatcaaaccgctgatggtcgtattgaaattccagaagttttacgtccttatatgaatggccttgagtatattggttaataaaaacctaattactcagtggttataatattaaaaccccctattaaacagggggttttttaatggtataaagagcatcaaaagactagtggtggtaatttctattaaccttttaacctgagtataattttattaatgttttatattctggctatatactagcttcagtatctaatacttcaatgaggttgagataagtaaggcaacaaagagaagaatacttctatttttctttcatttgtcatatcaacaaaatcgtccattgcaatttctataaaatcaatggtgttattatcaatagtgaatttatacattaaatggccactccaactgcgatgaacatagacacagttttctatactatatgaaagccatttatcttccatacatgcaggtaaccagccgtttagtatattttttttagcatcttcagttagggaataattaatatgatgaatcaatggtgttttttcaaaatactttaggttctttaacatttctttatttatcattctttattccacaaataataattgttattacagactacctaaatggacttaaatgatcaaaagaaacatatcattttttctctttaatacagatgaagggtgacattattaataaataatagcaggtagttttttactgatgatttttttaataaaagagcgttttattgctcttaatattatttaataacagttatcaggtgcagaaaaaacagatgattattaaaaaattcttactaaaataagtgagattaaataaaaatataatgcaattcgctattggttaaactgatcacagcagatcatctctatactgctacattaaaattatcgctcaagttaatttcaattatcttatgacgtttctatttatttagaaccctactaaagagcctattgtatgataatttctaaacagcagttacaccaattaatcaaaaataagttacataatgcaggactgaatgaaaaccatgcagacattgttgccgatgtattagttcatgctgatgtgaaaggaattcattcccatggtgctgtacgtgtggaatattatgctgagcgcattagtaagggaggaacaaatacgcatcctaagtttacttatcaagagacaggaccttgtagtgcgatttttgatggtgataatggtgctggacatgttgctgctaagcaggccatggagcacgcgattaatatggcacaagagaaaggcattgctgttgttggggttagacgtattggtcatagtggggcgttatcctactttgtagaacaagcctctgcatctggaatgattggtatttcactttgccaatcggatcctatggtagtgccatttggtggatctgaagtttattatggcactaatcctatcgctttttcagccccgagtgcagatgataaacctattacctttgatatggcgacgacggtgcaggcatggggtaaaattctcgatgcgcgggctaaacatagtgacattcctgacacatgggcggtagatgaagcgggcaaaccaacctgtgatccctttgcagtaaaaggtttattacctattgcggggccaaaaggctatggcttgatgatgatggtcgatgtattgtccggtattttattaggattaccctttggtaaacatgttagctctatgtatcatgatttgacacaaggtcgtgaattaggtcagctccacattgtgattaatccagcctttttcactgatgctgatttatttaaaaaacacatttctcaagtaatggctgagttaaagagtattaagcctgcagtcggttttgaacaggtattatatcctggggaaaatagtcagcttgcagcgcagcgaagcgaaaaagaggggatagaaatagttgacgaaatttatcattacttaaattctgatgtattatttaatcaatcttatgataataaaaatccatttgccagctaagttatattaataaaaaaacagccatccattaattaggtggctgtttttgggttatccaaaattataaaatatttaactgactaatttaccgatattcgattctgcggttttatttaaagaaactttattcccaccatcaccattattgtcattgttatcagtatggttattagtcatattacccatatttttctgatagaaaatatggcgatatgatccatacattgcagtaaaagagagtggaatagtgataaataagcctaatccaaatgggataatactcaagccaataatgatgcttaacagcacaaagaatagaaagccaccaaataagttgtttttaaccgccataaaactggctttaacggcagggatagctttatagtcatttactaaaattaaggcaggggcaaaccaataagaggcagtactgattaagctaaaaatgataataatgatagaagaaaacgtaattggtgtcaggttatcagccaataagccttgaatatagtaggttggtgcatcattaagagcggcttgagcaacttccatcaataatgaaccactgattaatagtgctaaaataaagcctgctaagataataagcacactaataccataagcacccatgatgctaaggtagcgtttgttctggaaaccagaaaataaattatccagatttagctgaccagtctcatattgctgatgggctatcatcataagcccggcaactaatacagctgaaataaacggggagataatcggcccaataagtgggataaatccaaggatagatgagataattaagttaacaagaaagtaaataattacagcgcctacccacataaaaaagcgctctttaactaaatcccagccaatacctaaccactcggttgcccctgaagcacctctttgtagaggaactggcgtaaacacctcttctggctccgtaagcgatgaactattatcttgttccatttttttctctgccttaaaaataattaattgtttataaatataactttttataattcatatcatatctttttattttgtaattaatcaatactattaaactaaagaatgcttaaggataatcttagaaacttctaaatgaccattagaatgagtaacaattttatattgtcataattaactgcaatagtcgttattaaaaatatctttatttgaggtatggaaaacaatattttttaatttagtggctggcgctttctcaaaagaacatgccgcagggaggggaaaacttgatggcagttttacataaaaaaagcagtacattgtgcactgctttttaaaatgggggtgtataaaagcttaatacatcactttatgaccataagatgcaataattgctttaacattttccatcgtctcttttgacggtggatgaataccatcgagtttatactcttctcctaaagcaacccatttatgtttacctaattcgtggtaagggagaagctcgactttttcgatatttttcatatcttttataaattcgcctaaacgatgagcagaatcatcatcatcagaccaaccgggcacaactacgtaacgtatccaggttttttggcctcgtttagctaaatagcgggcgaattccagtgtacgttggttagaaacaccaaccagtttttggtgaatgtcatcattcacttgttttaaatccagcatgactaaatcagtcacgtccattaattcatcgatgacaggatcataacggcgtacaaaaccgttagtatctaagcaggtatggatattttcttttttacaagcacggaaccaatcacgtacaaattctgcttgtaagatagcttcaccaccagaagctgtaacgccaccaccagaggcattcataaagtgacgataagtcactgcctctttcattaattcatcaactgtgacgatttgcccaccatgagtatcccatgtgtcacggttgtgacaatagaggcatctcattaggcatccttggaagaaaacaataaagcgtattccgggaccgtcaacagtaccgcaggattcaaatgagtggatacgaccaagtacggacataacagggttactccaaaactgtctagataaaaaggccccaaagtaggggcctttattctaagcgattttatctactttctcagtaaataaatgcatgagttatcaaattacattgtttgagtgaatgtacgagtgataacgtcttgttgctgctctttagttaatgagttgaaacggactgcataaccagaaacacggatagttaattgaggatatttctcaggatcttccattgcttctaacagcatttcacgattcattacgttaacattcagatgttggccaccttcgatatccgcttcatgatggaagtaaccatccatcagacctgcaaggtttgctttacgaacatcatcatctttacctaacgcgttaggtacgatagagaaggtataagaaataccatctttcgcgtaagcaaatggcagtttagcaactgaagttaatgaagcaactgcacctttttggtcacggccatgcattgggttagcacctggtccgaatggtgcgccagcacgacgaccgtctggagtgttacctgttttcttaccatacacaacgtttgaagtgatggtcagaattgactgagttggcactgcgttacggtaagtgtgcagtttctgaattttcttcatgaaacgttcaactaagtcacaagcgatatcatcaacacgagaatcgttgttaccaaattgtgggtattcaccttcaatgttgaagtctacggctaaaccgttttcatcacggattggtgatacttttgcatatttgatagcagacagtgagtcagccgcaacagatagacctgcgataccacaagccatagtacggtatacatcacggtcatgaagtgccatcagtgctgcttcatagctgtatttatcgtgcatgtagtggataacattcagtgcagtaacatactgagttgctaaccaatccataaattgatccatacggttcatcacagtatcaaagtctaatacttcgtccatgataggtgcgtgttttggacctacttggattttcagtttctcatccacaccaccattgatggtatacagtaaggttttagctaagtttgcacgagcaccgaagaactgcatttgtttacccacaaccattgggctaacacaacatgcaattgcatagtcatcactgttgaagtcaggacgcattaagtcatcattttcgtactggattgaagaagtatcgattgagactttagctgcatattttttgaaattaataggcagttgttctgaccataggatagtcatgtttggttctggtgaaggacccatggtgtacagggtatttaagaaacggaaagtattcttagttaccaaagtacgaccatctaaacccataccacctaatgattctgttgcccagattgggtcaccagagaataattcatcatactcaggagtacgtaagaaacgaaccatacgtaatttcatgactaagtggtcaattaattcctgagcttgttcttcagtcaacagacctgcatcgagatcacgttggatatagatatctaagaaagtagatacacgaccgaaggacattgctgcgccgttttgagatttaacggcggctaagtaaccgaagtaagtccattgtactgcttctttcgcattttgagctgggcgagaaatatcacaaccatatttcgcagccatttcttggatttgacctaatgcagcgtgctgctctgcgatttcttcacgcagttggatagtcatttccagatcttcacctttttccagtttttcttgtaaagaggtgaattgagcgaatttgtctttacgtaggaactcgataccgtacagtgcaacacgacggtagtcaccgatgatacggccacgaccataagcatctggcagaccagttaagatacctgatttacggcattttaagatgtctggagtataaacatcgaatacaccttggttgtgtgttttacgatattcagtaaagatttttttcagctctggatctagctcacggttataagcgtggcaagaactttcaaccatacggatcccaccgaatgggatgattgcacgttttagaggtgcatcagtctgtaaaccgacgatttgttctaaatctttttcgatataacccgcatcgtgtgaagtgatagttgaagcaacagaagtatcaaaatcaaccggcgcatgagtgcggttttcaattttgatgccttccataacttgttcccaaagtgtatcagttgctttagtggaacctgctaggaaagattcgtcgccttcatatggagtatagtttttttgaataaagtcacgaacattaacattgttctgccattcaccttcagaaaaacctttccatgcttcagcaaatttttcatttaaatcagacatgatacttctacctttttacaatggaacttaagaaatcagtcataactgcacggattaatgtttatcgccgcgcagatgcattaaccagtataccagaccgactaggactgctccgccgataatattaccgatagtgactggcaataaattatcaacgaggaaatttgatactgttagatttgaaaattgttctggtgatgcacctactgtagtccagaattctgccggtgcaaaattcttaattacaatacctaaaggaataagaaacatgttagcgatactgtgctcaaagccactcgccacaaacataccgataggtaaaataagtgcaaagagtttatcaattaaagttcgacctgcataactcatccaaactgcaagacaaaccattaaattagctaaaatacctaaacaaactgcttcaataaaggtgtgctcaactttatgctgtgcagtttgtaatacattcagaccccataacccattagctgctgcatattgacctgcaaaccacattaaggcaacaaagaatagggcgccaataaagttaccaatatagacatttatccaattagcgaacatcttagcccaagaaatacgtcctgtcgctttaggaataatggtgagtacagttgaagtgaataagtctgcaccacaaacaaccacgagcattaagcctaaagagaaacaaattcctccaacgagtttagcgagaccaaatggaacagatgcggtgcctgtagtcgctgtaatataaaaaacaaacgcaattgaaataaacattcccgcagtaaaagcagataagtaagttgttgggatatgtttgtttgctttataacaacatgcatcatcggcaacttttgccatatcagcaggtgataataaattaaaagggctgtcagctttcatactaacactctcttatatgttggaataattatagcacgcaataatagtagcaaagggtcttactcctaaagttgatatggatcatagtcgcttatgagagacgcaattttagtacgtaaaaaccggctaaattagctataattatttgattaataataagaaaaaattttttaaattttatcaaaaaattttagcctggctggataaacaaagtaaaaagtaaatataacgtattatttatttctattgacgttaacagttaaaaataaaatttaacgctccatttacttttgtgctaaatataaacattactttatttgtggataatctaattgattacgccagccttaaaaccattataaaaatacggtttttaaatttttgagatctaggtaaataattagcaatttaaactatatttttgtgttttttttagattaaaaagttaatcttatctttttacgtcatatttaaaacttaaaatcgtcacttttgacatatttgacacttttgtcatttgacataattgtcatggtggcaaaattgtcgttatatttttttatatataataaaacactctacttgttagtagagtgttttgattttaaacaaagcgattattattcagttaaaaataattatttaataaataaccttaaataaaatagtgttatttattcgattgacgttttgcttgttgtaatttttcatacgcggctaataaagattgatgaactggcaaattcgctaatgatggatcaatgggttgcaagccataaaaaggttgtttaccttcaattgcatttaatgcagcttgcagtgtttcctcgccatacatacgagaaaatgcctccatatattgtgcaggcccacgctcatgctcttcacgtaatagtaaaagattatgcaggcaacgataataattttgacgcgctggtgtaaataatgatgcgttgaaatcttgtgtccactcaacccaaactaatgcttgttctaaatcgccgccagcgagtgctaacattgattttaattcacctacacgtaaatgactccagccattatctttacccggtgcaataccaatcatttctctgatacgagtaaagtcatctaagccatcttcatcaaattggccaataagtgagaggtactcttcctttgtgccatgacttgttggtaaagaaagaatggtatcacgccaatggacacccataatattattggctagttgcagatcttcagcaggataaatatcggataagccagggactaaaatacggcaagcataaacccctaaatggtcataatccataatatacacttccgcaccacattgctggcacagtgacattaatgtgtgaaattcttcttcggttgaaccactgaaatcccaatcaacaaatggatagtctgcatcttttttaaacagatcccaactaattaaaccactagagtcgataaagtgggtttcaagattagtgtggtcaccgacttcttcatcatcaaaactcggtggattgaaaacatcgagatctttaaggctacggccttgcaataactcagtaacagtacgctctaatgccacaccaaaatcgggatgagcaccaaaagaagcgaaacaagtcccattttgtgggttaaacagcacgacgcaaataacggggaattgtccccctaaagatgcatcaaaactaaaaatagggaagccttctttttctaatgtcgtaatagcttcaataacagcaggataacgagctaaaacttcatgggggattttaggcaagctaattctttcgctgataattctatttttgacatagcgttcaaacacttcagaaagcccttgcactcgagcttcattttgcgtatttcctgctgacataccattagatgcataaagatttgcaatgatattaacaggtatatatacaggtgttttatctgattggcgaataaacggtaaggcacaaataccacgttctgaattacttgattgtaaatcaaccagttcactgccacatagctcaccttcaggatcgtaaaattgacgtaaacgtgcatctaataagccttcaggtacagcatcatcatctgtcagtggaaaccatttttcatttgggtaatgaacaaactcaccttctgcaatatcagcacctaaccagaaatcagaaaagaaataattggttgagagacgttcaaaatattcgcctaatgctgaagccaatgctgcttttttagtagcacctttgccgttagtaaaacataacggacaatctttatcacgaatatgaacagaccaaacgttaggaacaggatttaaccatgaagcttcttcaatgttaaaacctaactgagttaatttttgctgaaagctagcgatagagtcttccagtgcggcatctttgccgggaataaatgtttgtgacatggcaggtttcatcaatattttacgagtgatagttaggggcacatgatactgaaatcgtcgctaatgcactaattatttctcgtgtcggttgattttaaataacattccttatcattaatgcactaatatattagttcttttgataaattcgttctatttatcacggaattactgataataaatcatcataattggacgcgattttatagactcataaggattaaaaaatgataagaaaaacattgctagccagcttattaaccgtaattagtggtaccgtttttgctttacctaatgtgacaatcctcgcaactgggggaaccatcgcagggggtggagactctgccacttcttcaagctacacagcaggaaaattaggcattgatacattgattaatgccgtacctgaggcaaaaaaagtggctaacttaacaggcgagcaagtggttaatattggttcgcaagatatgaacgaccaagtgtggttaaaactggcgaataaaattaatacggattgtgataaaacagacggctttgtgataacccatggtacagatacgatggaagagaccgcctattttcttgacttaaccacagcatgtaaaaaaccggtggtgatggtaggggcaatgcgcccagcaacagcattaggtgctgatggtccattaaacctctataatgccgtggtggtggcaagtgataaagcatctgaaaatcgtggtgtattagttaccatgaataattcggtgattagtggtaaagatgttgtcaaaatgaatacgacagaagtgcaagcattccagccgattaatgcaggtgctcaaggttatgttcatgatggtaaagtacactattatactgctgcaacaccacgcgctgagaaagttgcctttgatgtcagcaaattaaccgaattaccaaaagtaggtattgtttataactatgctaatgcatctgatttaccggctaaagcgtttatagataaccactttaaaggtattgttagtgcaggtgtcggcaatggtaacttatattctgacatcttaaatactttagcagatggtgtaaaaaaaggtgttgttgtggttcgttcaagtcgtgttccggttggatttaccacacaaaatggtgaagtagatgatgcaaaatatggctttattgcttcagaacgtttaaatccacagaaagcaagagtgttattacagttatctttgacagaaacacaagatcccgccacgatccaagaaaactttgaaaaatattaattagattttttgttttttagttaaatcagaaaaccatctgctgataaatagcagatggttttctttgttaaatattattttattttgcgtaacttagtataaattttgatatcttctctattattttgaatattattcatatttttatcgcgtgtgtgtaaacgttctgtcttgataataccatcatttatcagcttgctatcctcactaatatttaaagttaagtttttcatttggctaatagtatttttgggtattaaccctatgtatgtctcgctatagctattgttatttttaccagtattaagccaatattgcatgccaatagttccattttccatattgtatatgaaagacttattttgcagatctaaatatccgtttctagcgagaatatatccatggttattaaatattgttttatttagattaagttgtatggcatttttactacggttactactttctaaactaccataattataaatagtagtatcagaagcattgataatgatatttttagaagaaattataccttgttctttagaattactatttttatcacctaatattatctgattggggagattatttctttttatatttgagcgcatggcgtattcttgttttaagatactttcgccttctttaattattacttcttctttacctgaatgaatatttatctctcctttagaagatataaatcctttttctaacttaatgttattagatatgataatcaggttattaaaagaaggattagaactgcggtcattttgattactgaatacaattttgccaatatgatcaattggcttaccaccaaaagctctttcatctaaggaagagattgatgtttctaatcggtaaccgattaattctctattatcgataataggttttccggttgataacgtttcagataaggtattcgaaaagcgacacccctgacattcaataccatttgggttggctataacaacatgagctgcattgccagctaccgcaatattccctgataagagtgacgttgctccattaaccacttcattaataatagtctcagcggcaacctctttattatttaaaataatgccagcatcagttacatgaaatctatcatatttattataagaaatgcctttggcattttttggtgctattaatatttctgcttgattaggattagcttcattgggtttaattgtggttgaagaatcttgattaataaaaacaagattagaataatgtttatcatgttcatagctaggctgtactacggcttggcatattgatggtgtgtatattacaccaattattattgcatttattaatttcatatgtttacccttgtatattatttagggctaatttagcgatattaaaaacataaataaagatagtcaggtttaaaaggcgtttatttataaaaaataaaaaggctatttttttaatagccttttgggttatatgttattaatgttttcttatattggaaacaacgatttttgcagtaataaatgcaatcagtggggtaatagaaaatacaataaataaccaatgggctgcattttgtgcgccagcaatacctccggggttggttaatcctgccatatttacaacagtacctgaaatggcagcacctacagcggttgaaaatagctgaatagtggtgattgacgtcgccgctttttgcgcttcttccccttgagaaacctgtaatacacgagtgagataatgaggccaagccatgccaattcctgcacctgtaaaaaagagggctagacaaataataatcacttggccataaggtaaaagaagataatttgaaattaataagccaagaacaattatggcagtaaagttaatggcagggccgatacgcataatacgctgagcaatactgcttggttgagatgaagagataatagccgaaaaagaccaaccagcaccgactaaagcagctaaataaccggaaagtaacggagtaatgccatggatcatttgtaaaaaatagggcacaaacacttctgtctgaacacttattcctagcaatgccatagtcagataaataggggatagtggggctgagaaagagaatgttcctttaggaaaaagcccatcatgagatctcttatcgatataaattaataataagataaaaataattgctaatagaaaagataaaatatgatatagcgtaacgtgatacaagctaccgattgagatagataacactgctaatattaataaggtaagttgtaggtagggaagtgatgtttttttgttagcaatatcagcactgttttccttaggaaggatagtaaacagtagaatagcataaggaatgcctacacaaagaatagaccaaaaagcaccccgccaaatattatattctgcaaatattcctcctaatgcgggacccagcaacgttgatattccccacatactggacattaacgccatagctcgagaccataatggttgcggaaacatcaccctgaccaatgaataagctaaagccagtaacattccgccccccgcaccttgaataaatcggccaaccaacaagattggcattgaaggggcggtagcacagataatagagccgactaaaaagcagagtgtggcaaataagtagctattacgtggcgcgagcaaaattaataaacgagaagttagcgccgaagagagaatggatgccaaaataaaaacggtggtattccatgcatataaattaagccccccgatatcacgaacaatagaaggtagggtggtaatggtgatatagacattaatagcatgtaatgccactccccctgctaaagcgagtgattttagactatttcgtcctttaagtagcattccccagctcgcatcttcctttttatactgactccccgacataaaatactcctaacgattatttttgtgtgctacacataatacgtaagtttacaaaagtcattgcgccaattagaggagaatgatacaaccgatagaggtcgttttgtcaaaacatattcagatagggtgaatttgaatgagtcaggtatataactttagtgcaggtccggccatgttaccggcagaagttcttcgtcgtgcagaattagaattatgcaactggcacggattagggcgttctgttatggagatcagccaccgcagtaaagaatttttggaggttgcccatcaggcagagcaagatctacgggatctactcaatgtaccagaaaattataaaattctgttctgtcatggtggcgctcgtggtcattttgcggcattaccgcttaatttattaggtgagaaaaccaccgctgattatatcgatggaggatattgggctaaaagtgctgccgatgaagcggaaaaatattgttcacctaatatcattaaaataaagacagaaattgacggtaaaatcgcggttaaaccaatgaaagagtggcaattaagtgataatgcagcctatgtgcattattgcccaaatgagactatcgatgggattgctatccacgaagagccggattttgatgataaaaaaattgttattgccgactactcttccgctattttatctcagccacttgatgttagccgttttggcatgatttacgctggagcacaaaaaaatattggtcctgcggggttaacattggtaattattcgcgaagatttactgggtaaagcacgtaaagaaaccccttcagtatttgattacacagtactggctgaaaatgactccatgtttaatacaccgccgacttttgcttggtacttatcaggcatggtgtttaaatggttaaaagagcaaggtggcttgcaagagatagcaaaacgcaattatgagaaagcgacactgctttatagtgcgattgataacagtgatttctatattaaccgtattgccacagaaaaccgctctttgatgaacgtacctttccaaatgtcttctcctgctttagatgcggttttcttaaaagaagctgaagagcaaggattagttgcgctgaaagggcaccgtgtttcaggcggtatgcgtgcatctatttataacgcaatgccttttgctggtgtacaagcattagttgattttatggctgattttgagcgtcgccacgcttaatggttaccttttcactgctgcaaaacctgccttattggcaggttttctgataattaaagcacagagagccaataactgttatctctgtgccaatatggcaaatagataaatattaattacgataatcatactatttgacattattacacagcgtctctacctattttgacttatctagcggagcttttacctgtttatggaatcgttgacattacaacccatcgtacatattgaaggcactatcaatttacccggatcaaaaagtgtctctaaccgtgcacttttattggcagctttagccaagggaaaaacgcgtttaactaatttattagatagtgatgatattcgtcatatgctcaatgcgctaaccgccttaggggtacaatatcaattatcaaataataatacggtatgtgatattgaagggttagcaggttcttttcatccccagcagccacttgagctttttttaggcaatgcaggaacagcgatgcgcccattggcggcagctttaagcctcggagagcacgatattgttcttacgggtgagcctcgtatgaaagagcgtcctattggtcatttagtggatgcgttacgtcaagggggggcaaaaattgattatcttgaacaaacggactatccgccactacgtgtttgtgggggattttcgggcgggagtgttgatgttgatggcaccgtttccagccaatttctgaccgcattactaatgatggcgcctttagctcagcaagacaccactattaccattaaaggtgaattagtctctaaaccttatattgatatcacgttagccttgattaacacttttggtggagaaattgaaaatcaaaactatcagcgttttatgattaaaggtggtcaacaatatcaatctccgggtaaatatttggttgaaggcgatgcatcttctgcctcttattttttggcggcagccgccattaaaggagggatcgtgcgagtaaccggcattggtaaaaatagcttgcaaggtgatatccattttgcgtctgtgcttgaaaaaatgggggctacaatacgttggggtgacgattatatagagtgtgaacgtggcaagttaaaagggatagatatggatatgaatactattcctgatgcggcaatgacgattgctacgacagcgctttttgctgagggtgaaacgactatccgtaatatctataactggcgggtaaaagagactgaccgtctatctgccatggcgacagaattacgtaaagttggtgcgatggttgatgaaggtcgcgactacttaactgtgataccgcctaaacagttaacgacggctgaaataaaaacctataatgatcaccggatagctatgtgtttttcacttgtggcattgtctaacacgccgattactattcttgatcctggctgtacggcaaaaacattccctgactattttgaaaaactagcaagtatttctcatgcaaaagtttaattaaaatagcatcaattaaatcgatagtattggcttttctctagtacgatactatcgattttcttaatttaagcgtgtttttattctataaataagtagattaataaaaaattatctttaaaaagcacagcttgtttttaactgcttgtttcctcctctagagagtatgcgtataatgacgcgcaatatattaatactgtttttctctgtttagagcttatgttgtagaacgccataggttcacggcagtaaatatagaaaaacagtgcccatgaaaaggagaaactcatggcggttatcgtccctgtaattactgttgatgggcctagcggagcaggtaaaggaacattgtgtcaagcattagcaaaagcctttggttggcatttacttgattccggtgctatttaccgtgtattagcattagcagcattacatcatcatgtggacattacatcagaagatgcattagtgcctttagcggcgaatttggatgtgcgctttattcctaatgaaaatggattaagtgttattctggaaggtgaagatgtttcaaccgaaattcgtactgaaaccgttggcaacacagcgtcacaagcagcaacgtttcctcgcgtaagagaagcattattacgccgtcagcgtgcatttcgtactgcaccgggattaattgctgatggccgagatatgggcacaatcgtttttcctgatgcgcaagtaaaaatatttcttgatgccagtgcgcaagagcgtgcacgtcgtcgcatgttacagttgcaggagaaaggctttaatgttaactttgaacgccttttatccgagataaaagagcgtgattatcgtgatagaaatcgcgcagtagcgcctttggttgcggcaaaagatgcattaattctcgattcaacaagcttatctattgatgaagttattgaaaaatcgttagcttatgcgaaaaaaatctgcaattaacagcgtaattcgtttttatttcgtttatactaggtaattattaaaatcgggttgacgtgttaatgaatacacaataatgcccgatgaccttgtcacaaaggatgtaacgaggtatgtgaaacaaccccattcggccggatgctaaatggacgttaattaaatttacttgaagatcattaacatgacagaatcttttgctcaactctttgaagaatccctaaaaacaatcgaaactcgtccaggtgcaatcgttcgtggcgttgttgttgctatcgataaagacgttgttctggttgatgcaggtctgaaatcagaatctgcgattcctgtagaacaattcaaaaacgcgcaaggcgaattagaaatccaagtgggtgacgaaattgacgttgctctggacgcggttgaagatggcttcggtgaaaccgttctgtctcgtgagaaagctaaacgtcacgaagcgtggctgatgctggaaaaagcttacgaagaaaacgaaactgttgttggtatcatcaacggtaaagttaaaggtggtttcactgttgaactgaacggcattcgtgcgttcttaccgggttcactggtagacgttcgcccagttcgcgatacaactcatctggaaaacaaagagcttgagttcaaagtcatcaaattagaccaaaaacgtaacaacgttgttgtgtctcgtcgtgcggttatcgaatctgagaacagcgcagaacgtgatcaactgttagaaaacctgcaagaaggcatggaagttaaaggtatcgttaagaaccttactgactacggtgcattcgttgatctgggcggtgttgacggcttactgcacatcactgatatggcttggaaacgtgttaaacacccaagcgaaattgtcaatgttggcgacgaaatcactgttaaagtcctgaaattcgaccgtgagcgtactcgcgtatcattaggtctgaaacaactgggcgaagatccatgggtagctatcgctaaacgttatccagaaggtactaaactgactggtcgtgtaactaacctgactgactatggttgcttcgtagaaatcgaagaaggcgttgaaggtctggtacacgtttctgaaatggattggactaacaaaaacattcacccatctaaagttgttaacgttggtgatgttgttgaagttatggttcttgacatcgatgaagaacgtcgtcgtatttcactgggtctgaaacagtgtaaagcaaatccatggcagcaattcgcagaaactcacaacaaaaacgaccgtgttgaaggtaaaatcaagtctatcactgacttcggtatcttcatcggcttagacggtggtattgacggtctggttcacttatctgacatttcttggaatgttgcaggtgaagaagctgttcgtgagtacaaaaaaggcgacgaaatcgctgcagtagtactgcaagttgacgctgagcgtgagcgtatctctctgggcgttaaacaattatcagaagatccattcaataattacctgtctgctcacaaaaaaggtgctattgtttctggtaaagtaactgctgttgatgctaaaggcgcaactgtagaattagctgacggcgttgaaggttacctacgtgcttcagaagcttcacgtgaccgcgttgaagatgcaactctggttctgaatgttggcgatgctgtagaagctaaatacactggtgttgaccgtaaaaaccgcgttatcaacctgtctgttcgtgctaaagacgaagcagatgagaaagacgctatcgcttctgtaaacaacaaagaagaagctggtttttcaaacaacgctatggctgaagctttcaaagcagctaaaggcgaataatttaagttattaacggaaggcaacgagagtcgttgcctgtttatcggtagtctagggaggtaatatgaccaagtctgagttaatcgagagacttgcaggcctacaatctcatctttcggctaagacggttgaagaagctgtaaaagaaatgcttgatcatatggctgatactttggctgatggtgagcgtatcgaagtccgcggattcggcagtttttctctacactaccgtgcgccgcgtacgggtcgtaacccgaaaactggtgataaggtagagctggaaggtaaatacgttccacactttaagccaggtaaagagttacgtgaccgtgtaaatatttatacggaataatagtttcctatcaaataggcataaagttagtaaactttttcaaaaacggtgcttcggtgccgttttttattgggttatcggttggtattaagttacgttctactattctctattctctattctctattctctattctctattctctatattctttatcacttctctatattctctttattagcgattgttgtaagacattgggcttaccttacgtgatctttctctatttggcttgagttaattttgatatttgccgttattccatcactttttagaacaacttcgcaaaaaatagtgtatgcgcttaaaacgaaagtttttattaaaagagagttcgaaaaaaatacgattttaactatcttaggtaacaatttaacagcatgatattacaaggaaaaattaattatatggatgtaaaatatgattttattagccaagataaaatatatttatagaaataaaatagcgttaataaaatggcattatctatatgctaaatatattgcaatgctagggctaaaacctcttaatatagattatcttgccgttatcattatattaagttgcttacctttacttattcaacgtgaaacactgagtttatctctgagctatacactgattatcgtaggggtattattatatttaattcctttttcatacttacgttttttgttgctattactctgtttttggtgctatgcaaacagtactgcctcctctttaatggccaaaacctctcaacttgctgacaccattgccacaatagaaagcgcaattctagaatatcgtcgcttgccggatagcaatataatgattaaagttgctattcctaaacagcatctcttttctgctaagctctatgccaatatatattggcgtcatccgcctaaaaatgtcgtagtcgggcaaacatggctgtttaaaattcactttcgtgcagtacatggttatttaaatgagggaggatttgacagccaaaaatatgccgtttcagtaagagaaacattgtcaggaaaaatattatcagccacattaacgaattctcaccttcctatttatactcaatttattcactatctttcatcttattggcaagccacaaaaaatagtggtgaaatcacagcattagtgttaggtgataaacgaggtatttctgccgaaaataaaatactttatatgaaaacaggtatttcgcaccttattgtgatttcagggctgcatattggccttgctgctctgtttggttggctgatggcgagaggagtacaatatcttttcccaacgcaatggattaacccacaatttcctttggttattagtttaggttgtggtgttttttatgcggctttatcaggatgggggatccccgcaaccagagcgataataggcctaactatttgggttttactccattggcgtagtggactttttttaccttggcagtgggcgatttggagtgcggcagtgattttattgcttgatccgcttgccatattatccgctagtttttggttatccttttctgcggtatttgccatcattgtttggtattggctctatccattaaataaaagatttagccagcaaaaacgttggtttgttattagactcattcatttgcaactagggctattgatcatcttattaccttttcaatactacttatttggtggtggtaatctttttagcttgcttgttaatttatgggctgtgcctattatttcgtttattaccgtaccacttattatgtgtgggctatttactgcctttttacctgttctacaacctattatttggtcatgggttgatcagtctatcaattgggcatttttctgtgcgccttattttcttacgtattggcaaccctgtggcgctgtcccctggttatttgcattaagcggtattatgactcttttagttatcaaaatgagctggtggcgtcatcatgtgattattttgatcactattgctacttttttatattgtgaactgtctttctctaaacgttatgattggcgaataaccatgttagatattggacatggtttagctattattattgaaaaagagggagaagcggttatctatgacacagggatacgctggaaaagtggtggcactattgctaaaaatgtcattattccctatctaacgcatcatcgattacagcctgttgccatgataattagccatgatcaccttgatcatactggtggtattgacgacttattacgtgcttatcccaagttaactatccgtagtagctttgacaatccccaacatttaccgtgcttacaagggggagtatggcaatggaaagaccttactttcaacgcgctctggccgctgacattatctcgttcacctaaaaataatgattcttgtgtgatttcattaacggatggtaacagtgttattttattaacaggcgatctggaaaaagagggggaagcacaattactgagaaggaaaaaagcctatttaaaagcggatattttgcaagttcctcatcatggtagccaaacatcatccacattggcgtttattcaagcaatatcaccaaaatatgcactagtttctgctgcacgttatagcccttggcgtttaccttctgataaagtacataaccgttataaaaaagaggccattgattggctaacaacatcgataaatgggcaaatttctatcgagtttaaacacggaaagattgatgtagtcacctatagacgagatattttacctcgttggtatcatcagtggtttggtgttttgacgtttcccgagtagaatagcccgctatttattaaaagtttggtaatatatatgaatgatatagacctatcaacgtggcaaacattccgacgcttatggccgatgattcggatctttaaagcggggttgtttgctgcagcaggcgcattaatcataaatgcgggtgttgacgcatttatgatctctttattgaaacctctgcttgatgaaggcttcggtaaagcaagtaatgatgtattaaaatggatgcctttagccgttattggcctgatagttctgcgtggtatatctaactttatttctagttactgcctttcttgggtatcaggaaaagtcgtgatgaatatgcgccgtcggctgttttctcatattatgggaatgccggtgagcttttttgatcagcaatctacaggtacgttattatcacgtattacctatgattcagaacaggtcgcttcatcttcatcaggggctttgatcactgttgtccgtgaaggggcttatatcatcggcttatttggcttgatgttctactatagctggcagttatcacttatcttgattgtgatcgcacctattgtggcggtggtgatcagaatggtatcaacacgctttagaaccatcagtaagcgtatccaaaatagtatggggcaggtgacaacaagtgctgaacaaatgcttaaaggccataaagaagtcttaatttttaatggtcaagaagttgagaataagcgctttaatcatgttagtaaccatattcgccgccaaggtatgcgtatggtggtggcatcttctatatcagatcccattatccagcttattgcttcttttgctttagcctttgttttatatgcagccagttttcctgagattatggataccctgacagcagggacaattacggtggtcttctcttcaatggttgctttaatgcgcccattaaaatcattaactaacgttaatgctcaattccaacgaggcatggctgcttgccaaacattatttgctatccttgatatggaacaagagaaagatactggcacccttgagctgaaaaaaccaacaggtgatattgagttccgtaatgtcactttccaatatatcaccaaagatacacctgctttgaaaaatctgtccttcactattcctgaagggaaaacagtggcactagtagggcgttcaggctcaggtaaatctactattgcaaacctcctcactcgtttttatgacgttaacgaaggggagattttgatcaatggtcacgatattcgtgattacacattaagatcactacgtaatcaggttgcgttagtttcacaaaatgtacatctgtttaatgaaacggtagcaaacaatattgtgtatgcttgtgaagaccaatatacccgtgaggatatcgagaaagcggctaaaatggcccatgctatggactttatccaaaaattagataatggtctcgatactgaaattggtgaaaatggcgtgttgttatcaggtggtcagcgtcaacgtattgccattgcaagggcactattgcgtgatgcgcctattcttatcttagatgaggcaacttcagcattagatactgagtcagagcgggcaattcaagccgcacttgatgaactgcaaaaaaatagaacatcattagtgattgctcaccgtctatcaaccattgaaaaagcagatgaaattttagtgattgaagatggggaaattgttgaacgtggtgctcatcttgatttaattgagcgaaaaggcgtttatgctcagctacacaggatgcaatttggcaaatgattgagcggatttggtctggtaaatcgtggtgttaccttcttttattgcctttttcatggctctatggggcgatcagcctttttaggcgttttgcctataaacaaggctggttatcctcatggaaatcccccgtacctgttgttgtggtaggtaacttaacggcgggaggtaatggtaaaacaccagtggtgatttggcttgttgagcaattaaaagcacaaggctttaaacctgcggttgtttctcgtggttatggcgggaaatcagaccaatatcctttattattgtcgccagaaacacagccggccgtcgcaggagatgaaccggttttaatttatcatcgcactggcgtacctgttgccgttgcaccttctcgcagtgatgcagtcaaagcgctattagcgcaatatgatcttgatattattattactgatgatggattacagcattatgccctacagcgagattatgaaatcgtcgttattgatggacaacggcgttttggtaatggctggtggttgcccgcagggccgatgagagagcgcgctcatcgtcttgattctgttaatgcggttattgtcaatggtggtgattgtcaagcgaatgaaatagcgatgagtttagagggagaaatcgcggtaaatctaaagacaggtgagaaaaaagccattactgagttgggtaatgcagttgctatggcagggattggtcatcctcctcgtttctttaattccttgcaagataaaggggttaagttaattgcgactaaagcctttaatgatcatagtgaatataccctacaagagttacaaatactgacgcctcaccaagagccgctgattatgacagaaaaagacgcagttaaatgccagcattttgcgcaaaacaactggtggtatttgcctgtcagtgcggtattggaagatctatctgtgctaaatcaagtcagccaattagtgacaacgcgaaaaaaacttgtatatgatctgaaacaatgatatttataatggaaatcaggatagcgttacataaagattacctacccactaatcgcataccgcttttgtcgtagttcaatttaactcgctaataccctatctactcaaaagccttgtgtggagagtttttagatctttattgtagagttaatattgttatgctgtggatattattcatgcttgatagttaaaatgctttcgaatagaaattactttaacatttatatcaagcaagtttattgataggtacaggctacaatatagaatatgtcatatatttgtcatgaatattttgtagtttagtgtctgttcaataaatagttatctaatttagctatcacgattttgaacatttatattgaataataaaatgcactacttaaattaatgtgttcagaatttaatggggttttatataagaagacttaataaaaagtagaatgcatgtgtatagaagataaaaactatacaaagaacaaaaggagtttatctatcatgacattacaattaagaatgggtcgcgtaaaatggtttgacaataataaaggatatggtcttattgttgcaaaagatcttgaacaagatatttacgtcaataaaaaagcgattgccaatacaaaaaataaagcactaaccgaaggccaagacgttgagttttctgttatcaaaacagcagcaggtctagaagccgctgatgttatcgggttctaaatagtcgacacctataataaatgggtaagaccatgttttaacctattgatttaattaaaatctatcattacgttgatgcaaaaaggataaaataagacgttatcactgattgctcaaggtaatataaaatggttgccacgttaattagaatgcaataaagataataaaaaggttaaattattatcaataaaagcggaatgtaattctttattaatgatgttgcagacaaaacgataaaaggccacattattgtggcttttttgttgcttatagtgaaaaagaaaatagtaaatttattaatagagaaaatatttagcgaataattaccaaacccgcggtgtagagtattaacgctgatccttccttatgatatccttttatcctataacatgattaacccttgtgagggacaaaatggatcaccgcttactcgaaattattgcttgcccagtttgccatggcaaacttatctttgataaagaaaattcagagcttatctgcaaaattgatcatctcgcttatcctgttcgtgacaatattccggttctactagagaatgaagccagagagttgtcattagaagaggaaaaataacctaatgtttacggtcattatcccaggtcgatatgcgtcgactcggttacccggtaagccacttgctgatattcatggcaaaccgatgattgttcgtgttatggaacaagcaaagcgttcaggtgctaaacgtgtcattgttgcaactgataacttagatgtggttcgcgctgttgaacaagcgggtggagaagcgtgtatgacccgtgaagaccaccactcaggtacagagcgtttagctgaggttatcgaaaaatatcaattcgcagatgatgagataatcgttaatgtacaaggcgatgaaccactcattccacccgcaattattacgcaagtggcagaaaatttagctaattgtggtgcaggtatggcaactcttgctgtgcctatcgtcgactcaaaagaagcctttaatcctaacgctgtaaaagtggttatggatgcgaaaggttttgcactttacttttctcgagccactattccttgggaaagagatcgttttaatctctctcatgatgaaataggcgagcattacttacgtcatatcggtatttacgcttatcgtgcaggctttattcgtcgttatattacttgggagccaagcccattggagtctatcgaaatgttagagcagctgcgtgtattgtggtatggcgagaaaatccatgtagcaaaagcgcttgaagtaccgggtgtcggggttgatactcaagatgacttaattgccgcgagagccgcttttcgggcactaaaccaagagttctaatatttgcagtatattgcaaattaatgtttaacggcactggtattcagtgccgttgttgttttctaccatcgataaaaaagaggattgattatttttttacctaatgatctcattcttcatacgctattttatgccattgtcagcttcatttttattctcaacaaccgcctctatattagatgattcgctaggctttatggtttgccaaatcgagccgataaattcataccatgctcgctcactatgctgaaaataatacgcggaaggggtatatttttcccaaggatgcagaggggtagtaatggctagctgattagcaggtgcaacaatagggtgcatacctctagctaaaaagaaacgttctgcccgcgctaaatggtttgctgaggtcaccaataaaaaaggttgtttaccgataagtttatccacttcatacgcttcttcttcggtatctttaggttgagaaagggcgatcgttttttctgctggaacacctaatgattgtgcaacttgtgcagccacttcggcgctacttattttattgacgccggcaccaccggtaaaaattaagctggcattaggataacgataataaagccttacgccttcagcaacacgaaataagctattatttagcaggttagcactaggtgcccattcagggttataagtaaaaccgccccctaaaacgacaatgtagttaacatcttgtggtgagttttcgcgtaattcataacgtgcttgatacgctttttcactcggcatcaatagagtatctgcgacaggttgcatgcctaacagcgtaagtaacacaatcacgatagtgagtacgctttttcctgttttttgccaacgagtaaaccacagtaaaataagcgcaaaaaaagcaattattaataacagcggtagtggcatgattaggctaccaagatattttttgagcaaaaacagcataaatcttcctaagttgagtgaaatgtcagcaactgagagtaaaaatctagtgagaactaggggattgataaagcattgtgtcaaaatagcgtataagtatagtttttactaaatgctaacgaatagaaatactcactaatttagaaattgtaaaacgataaacgtttgagcgttaattttttcattaataagcgttatatttatactgcgctttgcgaataatctgattcatggcttattttgtgattgaaaacagccagtatcatcgaacactggtaaaattgttgtctttgtttaccttcagtacagtgtctcatatttttgaatttatcagaatgcaaagagcgcaagtaacaagttgttatcatgaggcgttttaatgtcagaccgtaattttgacgatattgctgataaattctctcgcaatatctatggcacaacaaaaggaaaaatccgccaagcggtgatttgggatgatttacaacaattattaactcaactccctgatcgtccgttgcgtattttagatgcggggggtggtgaaggttatttttccagacaactggcaaaattagggcaccagataattttatgtgatctatcacaagagatgcttaaccgcgcacaagaagcggctattgatgaaggtgttgtcaatcaaatgacgtttatttgttgtgcagcacaagagataaaccagcatctagatgatggtgttgacttaattctattccatgccgtattagagtggatcacagatcagaaaaacgccataaatgtacttaccgatatgctacttcctaatggtatcctatcgttaatgttttacaatgcgaatggcattgtcatgagaaatgctattttgggaaatttccatttggcaaatccggaaataccacgcagaagaaaacgctcattatccccacaaaatccgctacaacctgaggatgtttatcaatggttagcgtcattttcaatgacgattttaggaaaaacgggagtgcgtgtttttcatgactatttgcaaagtcgtcagttgcaaaataaagattttccagcgttgcttgccttagagcaacgctattgtcggcaagagccctatatcagtctggggcgttacattcatgtcatggcacaaaagtgtgtaaattaaggatgtactatgagtgattttacccagaccgttcctgagttagtgtcttgggcgagaaaaaatgatttctctatttcactgccaccggaaaggttagcttttttgatggcagttgctgtattaaacagcgaacgccttgatggcgagatgagtgaaggggagttgattgatgcctttcgagaggtgtgtaaaggctttgatcaacccgcagaatcaatacaagttcgtgctaataatgccattaatgatatggtcaagcagcggctttttaaccgttttaccagtgaactggtagaaggtaatgcgatatatcgtttaacgccattaggtattggcatcagtgattactacattcgtcaacgtgagttttcatcactacgcttgtcgatgcagctgtcaattgtggcaagtgagttagattcagcggcaagtgccgcagaagaaggtggtgatgcataccattggcatcgtaatgtttttgcaccgttaaaatattcggtggctgagatattcgatagcatcgatttatctcaacgcattatggatgaacagcaaaatatcgttaaagaagatattgctgcactattaaaccaagattggcaagctgccatttcaaactgtgaacaattactatctgaaacctctgggacattaagagagttacaagacacactggaagcggcaggggacaaattacaagcaaatctattacgtattcaagaagcgaatatgagttcaggccatgtcgaccaaatagatactttagtctttgagttacaaagtaaacttgaccgtattattagttggggacagcaatctatcgatttatggataggttacgataggcatgtgcataaatttattcgcacggcgatagatatggataaaaaccgtattttttcacgtcgcctacgccaatccgtacaaaactatttcgacagcccatgggcattaacttatgctaatgcggataggctatttgatatgcgtgatgaggagcttgtgttgcgagatgaagaagtgaccggggaattgcctgaagagctggaatatcaaatgttcagtgaagtaaatgaacaaattgctcaatgggttgaacaagagctggctgcttataaattagaacaacgagcgttagatctcagttcagtattagttgagtatcttaatcgttatccacaacagaagcattttgatgtggcacggattgtcattgatcaagcggtacgattaggtgtcgcgcaagctgaacttgcaggattgccagcaaaatgggcagaaattaacgaatatggagctaaggtacaagcgcatgtcatcgatacatactgaacaatttataccagctaaattagcacaggcattagcgaattcactttttcctgaactggatagtcagctacgtgcaggtcgacatattggtatagactcactagataaccatgcttttttgatggactttcaagatgagttaacagatttttatgcgcgttataatgtcgaattaattcgagcacctgaaggctttttttacttacgcccccgttcaacgacgcttattcctcgttcagtgctttctgaaatggatatgttggtcggcaaaattctttgttatctctaccttagccctgagcgattagctaatcaggggatcttcactgtgcaagaattatttgatgaattacgcacactggccgatgaaagcaaattgttacgcttagttaatcaacgctcgacaggatcggatttagacctacaaaaactgcaagagaaaatgagaacgtcacttaaccgactacgtcgtttagggatgatttcgtttttacccaatgatacgcaacgtttttcaattactgaatcggtgtttcgctttggtgctgatgtgcgtagtggtgactctcctcttgaagcgcaaatgcgtatgatccgcgatggtgaagctatgccactagagcaagatagcgagccaagtgatgacgatgaacaggaagatgagcaattagagtccagtgaagatgatgatgcagaggaagaaaataaatgattgaacgaggaaaatttcgctcattaacattgatcaactggaatgggttttttgctcgtacttttgatttagatgaattagtcacgactttatccggtggtaacggagcgggtaaatccaccaccatggcggcttttattaccgcgatgatccccgatctgactttacttcattttagaaataccactgaagccggttcaaccagtggctctcgtgataaaggattatatgggaaattacgcccgggagtttgttacgctgttttagatgtgattaattcccgccatttacgagctgtcgttggcgtacgcttacaacaagttgccggacgagataaaaaggttgatatcaaaccttttatgatccaagggctacctattgctgaaaatccaacagaaattttgacgcaagctgtcgatggacgccaagcacgtgttctaccacttaatgaattaaaagaaaaagtagaagcgatagaaggcgttgtttttagacaatttaactcgattactgatttccactctgtactctttgatttaggggttattccgaaacgtttacgctcagcaagcgatcgggcaaaattctatcgtcttattgaagcttcattatatggcggtatttcaagtgccatcactcgttctttacgcgactatttattacctgaaaatagcggagtaagaaaagccttccaagatatggaaggggcattacgtgaaaaccgcatgaccttagaagctattcgggtcactcaatccgatcgtgatctgtttaaacatttagttaccgaagcgacctcgtatgttgcagcggactatatgcgtcatgctaatgaaagacgagtacaccttgatcaggctctatctttacgtaaagagttgtgggatcagcgtaaagcgattaacaatgaagcttatcgctttattgaaatgggcaaagagttagaagagcaacaagcgttatcggctgatttggaaacggattatcaagccgccagtgatagacttaatcttgtacaaaatgcggtacgccaacaagaaaaaatcgatcgctatgttgcggatgtcgaagaaatcacattccgtttagaagagcaaagtgaagttgttgaagaagcaacatcaaaaaaagaagagttggaagcgcgagttggatctgcggaagaagaagttgatgaactgaaaagtcaattggcagattatcaacaagcgttagatgttcaacaaacccgagctattcaatatcgtcaggcggtacaagcattagagcgtgcgaaagcacaatgtggcattgatgatttagatgaaaccaatgccgagctatgggctgaacgtattcaagcaaaaattcaatccatcacgcattcattactttctatggagcagaaactcggtgtttctgatgcggccaaaacgcaatttgatcaagcctataaattgatcacctcgattgttggggaagttgagcgtcaaaatgcgtggagtgcggctaaaagcgcattacgtgaatggtcatcacatcgtcatcaagccgatcgtgttcaccctattcggatgcaattagctgaattagagcaacgtttacagcaaagaaataatgctgaacgtcaacttgcagagtttaataaacagtatggcaaaaatgttgagcctgatgatctatttactctacaagaagagctagaagcaaagattgaagagctgagcgattatgttagtgattctggcgaacagcgtatgcaaatgcgccaagagcttgatcaactaaaacaacaaattgaaaaattaagaaaacaagcgccagtttggtttgctgcacaagatgctttaacgcaactgtgtgaacaaacgcatcaatcttttgaaacaagcaatcaagttactgaatatatgcaacagttacttgagaaagagcgtgaagccacggttttgcgtgatgaaaccgctgctcgcaaacagcaaattgaagctcaaattgaacgattaagtcagcctagtggggctgaagatagtcgattaattactttagcagaacgctttaacggggttttattatcagagatttacgatgatatcaccttagatgatgcaccttatttctcagcattatatggacctgcgcgccatgcgattgtggtacaagatctcagtgcgatcgaagagcagttagcttctttagaagattgcccggaagatctctattttattgaaggtgatccacaatcctttgatgatagcgtgtttaatgcccaagagatggaaaaagcggtacttattaaaagttcagataggcagtggcgctattcacgttatcccgaaattccattatttggccgtgcagcacgagaaaaccagctagaaatattatcccgtcaacgagatgagctgtcagagctgtatgccacacaggcctttgatgtgcagaaaattcaacgtgcacaccatgcatttagccaatttgttgggcaacatatttcagtggcatttgatgccgatcctgaagaagatattcgccaattaaatcaacgtcgtaatgaattagagcgcgagttatcacaatatgaagagggcactcagcaacaacgtcagcattatgcgcaagctaaagagtcgctcaatttattaaataaactcattcctcaagtcaatttattattggacgaaacattaattgatcgtgttgaggagctacgtgaagagctttataacgcagaagagtcgatgcgttatttacagcgtcatgagaaagcattaactgcgttagagcctatagcctcgattttacaaagcgatccacaagagcatgatcaattaacacaagattatcaatacgcaaaagaagagcagcaacgttatcaacaacaagcatttttgctggtggaagtggttcagcgtcgtccacattttagttatagcgatgcggttgaaattgtcagtgaaaataacgatctcaatgaaaaattgcgtcgtcgtttagaaatggctgaaacagagcgagcgacagcgagagagttatatcgtcaacagcaggcacaatgtgatcagtttaatcaagtactagcctcactaaaaagttcttttgatactaaatcagaactattaagagagcttgagcaagagatgaaagagactggcttgcaaattgatgcgggtgcagaagcgcgagccaaagagttacgtgatcaacgttatgctgcggtgagtgctaaccgtacgcgtattagccaacttgagcgtgatattgcgcttagtgaagctgaacgtgaaaatatggcgaagaaaattcgcaaattagaacgtgattatggccaaatgcgtgaacacgtcgtcagcgctaaagccagttggtgtgctgttatgcgcttagtgaaagaaaatggtatggagcgccgtttacatcgtcgtgattttgcctatctttcagcggatgagttacgttcaatgtcggataaggcgctaggtgcgttacgtcaggctgtggcggataatgaatatttacgggatgcattacgtcgctctgaagacgcaaaataccctgatcgtaaagtccaattctttattgcggtttaccaacatttaagagaacgcattcgacaagatattatcaaaaccgatgatccggttgatgctatcgaacagatggaaattgaattagctcgcttaaccgaagagctaaccagtcgtgaacaaaaactggcgatcagctctcgcagtgtggcaaatattattcgtaaaactatccaacgtgaacaaaatcgcattcgcatgctaaatcagggcttacaagcggtttcctttggtcaggttcgtggtgtacggttaaacgttaatattcgtgaaagccatcaaatcttactggatgtattatcggaagaagaagatagccaatatcaagatctatttaaaaaccaaaacctaaccttctctgaagcgatggcaaaactgtatcaacgcttaaatccacaggctgattttggtcagcgtatgccacaaacggtgggtgaagagctacttgattaccgtaactatcttgagatggaagttgaagttaatcgtgggccagaaggttggttaaaagcagaaagtggtgcgctatcaacaggtgaagccattggtacaggtatgtctatcttagtgatggtggttcaaagttgggaagaagaatcacgacgcttaagagggaaagatatttcgccttgtcgtttgctcttccttgatgaagcggcacgtttagatgcgaaatctatcgcgaccctgtttgaactgtgtgaacgacttgatatgcaacttatcattgccgcaccagaaaatattagtccagaaaaaggcacaacttataaattagtgcgtaaagtctttaatggaagcgagcatgttcatgtggtcggattaaaaggctttgggcaacaaagtgaaaaagataaacatttatccgaaaatattgcagatagttgatgaaggatcatgatgagtaagtgaataaccttataatataacttattgttttcattattttatattttggttattcatgagtgttaatggcatttagtatttttatcaccgttattagtacaaatcagtgtacaaattttatagcgtgacccctcaataaaaagggaaatactaaatgcctctcatcaatttatatcgatgttaaaataatcaataaaagtggaaacagaggatagcgacaggtttgagtggaacaaaaacatgtgctttaagtcccattgattatttacatccctcatcgcagtattgctgtatttcattgagtaatctgcctacatggaagccatcacatacggcatgatgcacttgaattgctagtggcatcagaactttatctccttgcgtataatatttacctattgtaaatacaggggcaaagaaattgtttatattcgccacattcaagttaaaactggtgaaacttacccaaggatttgctgacacaaaaaacatattttcgataaattcttttggaaaataggctagatcgtcaccgtattgtgctatatcttctgaataagttttcaaaaaatgattgatatctttgtggtagtaactccataaagatgaaaatgtttcggtctgttcatgaaagatagtatacccagggttaacactatcccatatcaccaattccccgtctttcattgccatgcggaattctgcatgtttatttaccaataggctaatgatgtatataaatgtcggatagaatttgtacccattttgctttacggtttttaataatgaagtaatatccagttgaacggtctggctaaaggtgcattgagcaaaagactgaaatgcttcaaagtgttcttttcgtccccattgggatagatcaacaacagtatatcccacgcgctttgtgtccatattagctttcctattttctaatccaaatttaaattaattgtatattacttataaattattaaaacaatttcgaacctctatctgtagataaacccataacctatgataggtaataggtttttcttggctaattttaaaatgtttattttttaccaaaaaatgtttcaaaaataacagagtcattgatgtgttcatttgggaacgacttagataataacggcgctatctgctttcgtagatagtgctttcttttttcaaagtgttagatagatcaaaaaatgaaagtaaactaacaaaagagtaccagcctaaataaaataacgtgcgctatatctcatttaaatgtaattatgatgtttattattatcaccttctgtgattaatataaaaattaaaggaaagagaatgcgtaaagttacacttactcttagtgcaattgcgttggcgttaagtttaaatggcgcagcaatggcaaaagttcatatgccagaagttgttagcccaggggttactgttactgaacttgcacatcagcaaccaattaaatgggtttctgttgcagaaattgaaaaaagcttagaaggccaagcaccaatggcggtaggttttgatattgatgacactgttctgttctcaagcccaggcttttatcgtggtaaactggaatattctccaaacgatttcagttatctgaaaaacccagaattctgggaaaaaatgaacaacgaatgggataaattcagtatgcctaaacaagtcggtatcgatcttgttcagatgcacttaaaacgtggtgatactgtttatttcattaccggtcgtacacagactaaaacagagactgtgactaaatatgttcaagaaggtttaaatattcctgcagacaaaatgcaacctgttatttttgccggtgaccaacctggcgcaaataacaaagtaagctggatgcgcgatcacaaactgaaaatttactacggtgatgcagatgctgatatcgcagcagctgatgagctaaatatccgtgggatccgtatcttacgtgctgctaactcttcttaccagccgttacctaaagcgggacaatttggtgaagaagtggttatcaattcagagtactaatctgtctctgtgctgttgacctttatttgttaggcgtaggaaactacgccttttttattttgggtttctttataaaacaaaatagaaccatatgatagattaaatctatatactttatactttctatttgaatatttattgtgcacggcattgtgagtatttagtatttatactcttatttaatataaaaagtgtattaaacatctttttatgatgatttaagtgcctattgttgaaaagattttataaaactttacaaatattagtttattcctataaaactctttgtctaactcatctaatattttacgatagcaaaataataacaagggatgaggcactgaggactatggcgcaacaagcaattaaaagagcaataacgtattcggtcgtaataggtacacttctctcagggcataatgttattgcctcagaaagtgaaacaccaccgctattcacatcagaaacacctgcattagtacccgcattcacagaagatgtggcaacacaagatacattaaattcaccatcagtgagtaagcaggaagttagtactaaactacaatcttggttaccaagcgaatataaaccactttactttaagcaactcgtggatgtttatcaaagcaatgatttagcactgatttggcaagatgaacaaattacacaacaactagagcagcaattggcagaggttgccttaactggaattcaaccacaatttggacgttggttaacgctattagaaacagcacaattaacgccagaagcacgagatattattttatctgacgcttttttaggttatatcagctttgttgaacagattaatcaatcaggaacaacactgttatatcgcgctgcgatacaagcattaccggcaccaactgtgcaagctgtcgagcatttccaactcaatctacaacaaaataccttagggcgctttgtcgtctcctttgcaccctcacacccttactatccattaatgaaagaggaagtgcgcaaacagcttcatcaagaggttatttggcccgtcatggaagggaaaaattcattaaagccaaaccaatcggcagaagaagttattgcattaagacaaatattgcgtaacttaaatttactgcctcaattggctgaaagtgagcaagaagtagcaacaacgatttatgatgcgcctttaattgctgctgtaaaatcgtttcaagcggcccatggattagaaactgacggtattattggtagacagacgcgtaattggttaaatatgacaccaatacagcgtgctggaattatggcattaaatatacagcggttacgtttaaccccacctattggtgacactggaatttgggttaatattcctgattactccctctatttttatgctaataatcaactgattttagattcaaaagtgattgttggtcgaccagatagaaaaacccccattatgagtagtgcgcttaataatgttgtggttaatccgccttggaatgtacctacgagtatgacgcgtaaagatatagttccaaaaggaaaggctgatcctagttattttagccgtaaaggttatacgatttattcagggtgggggaatgacgcctatccaattaatccttacgatatagattgggaaaacatctctgcggctaattttccatatcgcatttggcaagcccctgggccaactaactccctaggtcgatataaatttaatatgccaaactctgaagcaatttatctgcatgacacaccaaaccacaatttatttactaaaaatatgcgagcaattagttcaggttgtattcgtgtgaataaagcggcgcaattagcgacgatattattaggtgatgcaggatggaaacaagatagaattgatgcagccttaaaacgaggttcaacacaatatgcaccaattccagaacgtatccctgtctatttatattatcaaacagcttgggtagcagaagaaaatgcccctcaatatcgagcagatatttataattatgaccaaagcattaataatgcaacctcttttttagagaatattaagaaatatttgtaatagaacagatggctaacaacaataaagagtaagtattatgcttgctctttattttttataaaaatcagtaagataaaataattttattcagttttattaataaattttaaaaaatagctattatttttaatctatttttagaaataacattaatattaatattaataaaatgttaattgctaacacggctattattaataataaaacataaacttttataaaataatatcaatgatatgtttacaaatctatacaaacaataagcaacaattcaagaaaaatattgtcataataaaggtctgttcttccttctatcattattttgagtgtagctatcatggatattgttgattcacatcgtcgtaagtggttaggccttggtatggctgctgttggtttaggtttacttccctcacatgcatttgcatcattagcaactccccgaccgaaaattcttcgctttaataatttaaatactggtgaaactattaaagccgagttttttgatggtaaacgttataataaacaagagcttgctagactaaatcatctttttagagatcaccgtcaaaataaagttaaaactatcgatccagccttatttgatcaaatctatctgttacaggtgatgttaaacaacaataaagccgttgaacttatttcgggttatcgttcactcgcgactaataatcatctacgtcaacacaccagcggtgttgcgaaaaaaagctatcatacccgtggtcaagcaatggatttccgtttagtaggtactgatttatctaaagtacgccaagtagcactaagaatgaaagcgggaggagtgggttattatccacgaagtaattttgttcatatcgatacaggacccgtgcgctcatggtaatctatgtaataaataaatagatatagattaagaaagcgcggagtaagctatgatgtatcacattatacctgtgacaaattatatgcaaaattgcaccgttatctggtgtgatgataccaaagaagcggccattgttgatcccggtggtgatgtcgaaacattaattgcagaaattgaacaacgtcaattaaagttgactaaagtgctattaactcatggtcactttgatcacgtagcaggaacggctcaaattgttgagcattttcatgtgcctgtttatgggccacataaagatgataacttccttattgaagatttagaacaacagtgtcgtatgtttaacttccccagtggaaaatcttttacgcctgatcaatggttaaatgaaggggatactgtcactattggtaaaaccattactttgtcggttttacattgtccgggccatacacctggccatattatttttgttaatcaccaaaataaacttatctcgatgggagatgtattatttcgtgaaagtattggtcgtactgatttccctcgtggtaatcatgccgatctgattgcctctatcaaaaataaagtattaccactaggtgatgattatctatttatccccggccatggccctatgtctaatttaggtcatgagcgtcaatataatcctttcttacaagatgaaatgcccatttggtaatttaaaataaagcaaactctttaagccctttatattaaagggcttttttatagataaaaaattaaaaatgatatcgctcatcgtcggtaaaattaaatatttttgctgatactataacctgatgttcctgcacaaatatggttccaagagatactttcatatcgaatagtaatatcttcataaggctgggcatctgcatgcgtcagtgaattagggtaatgtgctgatatattggtaatgctggcttttgttagcttaatggtataaaacttttcttgattgccgtttgaacttgttctatagaattctagctcgcactctaataattcattatttgttattgcaaccccaagtaagggtgaagatttatctataggttttgaaattaccacaggagaatgatttaaattttgtgctcgagttaaatcataatcaaatgaatacacaaatatctgatcttcatgtccgtgctgatatttattgcctatagatcctaaagtagagcaccctttggatatatcaccttgagatttccctattatctttaaatatattgaattagccattatttataactcctttttgatatttcttcatatgatattatcaactttataaacacttttattatgtgccatagttaatactactaattattaaatcattgatttatagccccttagtggtgagggagataaataccaagtggtgtttttctgatcgttgagtgtaactgacatttccaataacatattttcagataaacagaacgggaaaaaatggtaaagatgtgtagtaaagacaaaagcttcacctctattttcatattgtgtttcgtcaatgaatagcgataaagataaacaacgatagggtttaccttttaaaatatagtcatataaatgtgtttttagttcaacgagtccatttaataatcgctcacattttcgagtgatctgcctatcagtatctcggtaaagaatataatcagaaatcatatgtttaatagtatctaatgacattaacattgaaccattagcactgtaatgagataacaatttccaaaaatggtgattatttacaataggtggataacaagatgataataatgtgatatttcctgtttttactgcatcaggcattttttcgctgtgtttatttaatagacctaactcatttcttttatattgttcaaagccaatataaacacatgcaaaatgtaaactaggcggtgtgaccataggatcacctttattatcaaagaaattcaaataataaagtgtatgcccagtaatatttttctccattgttaatgaatagaaaatggctttatgaaattggggcattaaacgagaggcggcggttaattctgtcgtaggataaaaatgacagtatatgccacgcgctagctcatgaggctctagtgataactcaattttatcaagatcggccaaatagtgatgggttggaatagggagtaaataacttgatttattctttttaaaatcaattaaaagtgtatgttttgcttcactatcaatcgctggagcacagtttaaaaaaaagctctgattacactcttcttgagttaaaggaagttgctgactgaaatagatattcacaacaaaccgctgctgttgtttccaatctaattgagtcactatttgtggtatatctaactcaataaaatggtgaacatggggtaaataaagaccttctaataaacgttgtggtgcagaaaatgagttatttttctgtgggaagattttatagtcattgccaattttgggttcaaaagcataattaagaggatcgccttcataacgttcaccgttatgtaccacctcaattttttcaaaatattgactaaatgcgagtaataaaatgtctgaggtggttttattttcccctaaaaaaacattaagtgcatttgtttgagttaattccacatcaccacgatataatatttcaagagagatacaagagcggtttggatgctgagtaatttttctatccaaaatgctataaggcatgatggtgaaattatggcagaaactaaattgtgccccgttgtcgccaatcaccaaatgtttttcattaatctccatgggataggggagaatttcactttggtcaatttggataattgttgttgatggtaggcctttaatggcttgggaatttagtcgttgcagtaggggtaatgtgatctcaggaaaagcatcatcaattttatcttgtaaacgagcagataaaaaagcaaagccttctaagagataacttgtttgtggatcttgaggatcaagtacgctcgctaaatgtggcgctttatctgcatactcactgaacagtttttgtaagtactgcttttctttaatatatttaatttcactcatgatctaatccaaaagatgaatatgagccgggttttaaaccttgttgttcagcttgtttttgtaaatcataataacgagctaataacccattaattttattatcaatattattaagagttgcaggagaaataggttgccctgtttcaatttgtacagcgagttgtcgcagtttttcttcgattggctcaactttattgtgctgtttttgaatatcataaattgccgtttttagataagagagtgtaaaactgcctctatttcgttcttgctgaactattttattagaaagttgttgtaataatgtcgcggtttcagaccagctatcattaattggcatattctctaagcgcgtttgataaagattttgccaattacgtgtaaaataaatttgctctgcatctgtaggccaagcgtttttggctttttcttgcatcgtatcaattagccgtaaattagaaagaggagaacgtttttctaataatgctaaatgatactcgtagctatttaactgtggtttaaacaaccatttggcagccgcaccttcaggtattgaagtaatcgcattcatctcttgttttaaatagagatgtacaccaaatccgatagctaaaaacagtatgcaactgagcacacagccccatataaaacctcgggtcgcactcattttttttgctactacagtgaaagaagaggcgggttgaggtgtttcaatcacaaaagtgggggctgctttgtccgttgttttcgacggttgttgaatacagactaatggcggtacgctaacgggttcggcactatcttgttgcgtctgtttttcttgcttttcaatttgtttggctaagttttggaaaaaccacagtaagttttcaattttaggcagtttttcccaagttgttttagccagtttatcgattattaactgtaacgcgcgctctgaacgatagattaatcgtagatcttttgcttgataggattgttgtcttaataaagcgctggctttggtattaaaccagtttaatacctctgtacgttgatttggcttttccggccacaggctatcccaataagtcacaataacatttgctaataactcacatccttcagtaaaaccgcttaaaccatgctgttgtaatcttgcaatggtatagtaagcaccgctttgtaggtcgataccatgatttttaaatagggataagcaaagtgactcaataagtgtccaacttatttctggtcgagcagggtggctcaatttattaaattcggttttcagggcaataaattcaggggtatcaagtggagatcccccaattttaatcactaaactttctgatttcatcgcactcaacatccttttattcccccactataaagtgggggaaatcacattaataaagcgtttcaggtaaacggaattttgtgaataatccaccgaagaaaggattattagattcatcaactataactcgataagtcatatcaccaccgtcgattgtgaagcgaatatcgaatgagttagatttgatattgatgagttttgcattatcaactaatcgcatttgtgcccatggcccagagaaactgattgaacgtggcgatttatcaccggaaagaggcactaaagtcagtttactttcaatattggaacgcattgagtttggccataccaagtgtgtcacatggctgcgactatgagcgtaatcaatcaattgtccatcaagatttaagatgctacgacgcttattaccacttaatgacagtggctcaatagcatattgtgcttctaaattaccttgggcattaaagaaggtttctctaatacgattggctatttcaatttgtgctaatacatcagcgcggatcaatgattggctatcactatcgttaactaagttattctcaacgaataaacgcagattttgttgatagaagctatctaatgttccatttggtttgaagaaacgttcaaattcacttaaaggaacatcttgtttagctgctgggttaaatggatagcgaccggcaatataagtattgtattgtttgacaacattttcattccattctacttccatataacgaatagcttctttttggaccacattccatgcttgcactgataactcatcgacccagcggttaagcggctctggtaatgttttcgccatttgtgatagctcaaaaatagcgtcgcgattattatcgtttaagcgcatcgaaactgctttaagcgccgctttccccggcactggagagttttggatccccaataggtaacgatgtaagtcatttagtttttgattcagattctgtaaattttccccttggttactgactaatatctcagtttgaggagtaaattcgcgatctaagcgggttaataaacggtaagatggctcagccatcagtgttttttgttcatcaagtggtaaattttcatcaatagttggaataaccgtgttatcacgtagaacttgtaatgctcggcgtaatggttgttcaccactaataatttgctcaagagcggtaatttcatcttgtattgaatcaaattgacgaatttctaaattgctcatggcattacgccattgagccgtatagtcactaagatattgttcactgatttgacgctgaatttctttacgatcactttcactatattgtgtgttggtggttagattaagaacccaagcatcaagtaatgttagctcgaccaatttatcattttggcggataaaatagtttaataaccctgagcgcgttaagaattgtggaatttctaatttatcatcatcaatagccgtaaagaccgtattaaaacttgggccaatttgatgttgtaaatttaaaggcgctgaaagctcttgattagcctttaagcgtaaggcttgatatacacgctgataaagtgacaatacacttaactctgcttgtgcattttttataggtccagcaaaaggcataaaggctttagtggctgaaacaaatcctttttcacgctcttgtttccaatctgtgtgctcaagggcatagcgcaaatgggcttttagttgcagttgtttttcacgttgaccagtgaacagttggctccaataatcggccataaaatcttctaccatgccattattacggccacttttatcttctaacatgcgcataatacgcaatatctctaacttatcttcacttcctttgtcggcactgttaagttcatttaacaacccagacataaccgcaggtaaaaaacgatcggtgagtagttgtaaatagacttgttcaacttgtgggccaactttttgaccttggtaaagacccatatcagaaaagagcacatttttatcacgatgattaccataagctaaggttgcttcacgtaatggattgagcaccggtaattgtaggctaccatcagtatctttctgagcattgttctcaatagcacggaatgcttttacctcattaagaacgttttctccagcacgatagtttttgtcgtaatagtggctccaaccattccaaattgcgattaagccgacaaagctaacagcagtggtgactaataggcgagtccgatgttttttaacccaataatggttttctgctgcaatattaggctcactaaatagcacttgactaaataattgggtagtaaaataagggtggctatcattaattggccatgtagtaagaggtgctgtcggtaaatgatattgttcggacgctgtttggctaaacacatcatcgatttgaccgatttgcaatgcagaagttaaataaacccctcttaaacagatattatgttgctcattattgatgagcaatgcatcaattaatgtgcatacagaatgttgtaacccttcaatttggcgcacgaaactaaatagatcactacgctggttaccttctgctctttgtagcatcatttctggtaatgcgctgttcatttggcctacccattgtgaccaaaaatgatttaattcctttttccaattactttttgctttctggttgaaagaaacacctagtacttcattacgttgttgaacatctaatgattgatacattgagtcaaaaccacgtaatagatctagcttggttaagacgatatataaaggcaagcgactattaaatgtcatgcgtatttcttcaatacgcatttgtaaatcagcaagtagctgactattttgctccttactattggttaataacgatagggtatcgacagttaagacgatgccattcattggttgtcttgggcgattagttttgatccaattgagtaaatcgccccacaaacggtgataaagttgaggtttatcagcctgatttgccggctgggttaatagatcaccattagggacaaaaagtacagcattgtcggttaatagacattgaatatttaatgcaatattttgttcgttaacaatattgtcgctaggcgcaatatctaatgggtttaccgtattttttaataagctatgctttccactttggttagcacctaaaacaaaataccaagggcgtaaataaaccgctttagtatgaccatttaagtggcgaataaattgtgatttccaatagtttaaataacgtttttgaaaatcaagatcttgtcttaccggatcaactacagccaattcgacatcaagttttaatgcttccaattttttaactcgacgccatgttgctagaccaatccaactcacaacaagcaatacaataacgacggttgctaaccaacgtgtggtgacctcgctaaacggtatggaatcttgataacgaaatgttggcccccaccaccagatccaaataatgagcaaagcgggaagtaatgccaataaaaatagcaaaaaggaggcaattttagatttatcagcaaaaaagagtttttttaccgaactcgtaatgtttgaaatggagaaaaccggtaatttcattattattgatccctatccatagtcattgttatttctgtctttttgtctattttttgcatgagttgtcgtattaagttgggttcccaatctgcaagtgaataatgtgaggcagaggtattaagttgttggtataactgtgtagccatataatccatacctgacaattcaaatagttgtgcagacaataattgtccataaaatctatctctaggctctgatctgctagcaaggtttaattcaataagcttcagggctgcttcaagaccttgttgctcataacattgcaagacctcttgctctaggattgcagtattcgtattcgatggtggcaattgaccgttttcagtttggttatattgctctaaccactgttgtacactttcaggaaagaagggtgtcatatccgaaaagtgcaagttaacaagttcaggaagacgcgctaaaaaaatacgtaactcttcaataatgccactttctacttccccataacctaatttagctgctacttgtgcagctaacatatggccttctaaccagtaaggagagagtgagagactctgttcaatattgtttaatagcgtaatggacgcttgagtcagttgagctttgtaatccattacacggtcaattgatacgggggctaaaggcgttttaccttgagcattagcttgaggtaagaccgtaatagcgtgccaaattgcataacgccgtatacgatatcctactgaactttcaggggcttgttggcagataacatcagctacttgaagtaatgtttgtttccattgtctttcatcttgatggttaacgttaatagttggtgttaagctattttttgtcggtgtttctatagactcgctaaccggcggagtctgtactttttcttctttctcgacaggtgaagcaacaataatcggcgcatcgttattttcaatacgattataatctctgcttaaatcatcaatttgttctgcaagtgccgggctttgttcatgccaaaattgcgctagaaaggcgaacgagcctagaatatcatcacgcatcgcgctgttggctgcatgacaaaaactctcactcgctgtttcaaaacgtttcaaaacttgattggctaaacgtgatttcaatttcatattggttgggtagcaactttgccaatattgacgattaaaatcagttaggatctgtgctgccaatactaattcttttggctctccagcatgctgtaaagtacgtaataaatggactaagatccgaaaatctttagtctgcgtttcaaataggtgtaaacagcgacgctggatctctttaatatctaattgaccatgactaagtgagccgaactttatcatttcactgtcaatatattcccagtcggcatcattatcattgacagcactactgacttgctgttcatcaagtgctgtcagtagctgttgtttccatgcataagaagtattgttcatcatgatttctaccagtggcaagccgctcttaaagggattatttgttgtgaaatacctgaaatattgaaggtgagtttttcgttattagataatttcaatgtcaatctttcagcatttaacaagcgtttaatttcatctatgcccggtataccgcggcttgattccaatacataaccgttttcacgtaaaaaccattctgcagtaaattgtgttttatccgttgaaaccatcacactgccagcatcttgttttgttggcaggataatttgcatccgagtaatgttatcaatacagctcagcattaagatggggcgaggcggttgaaagccaatcgctggaatggtcattaatacgggataatcaccggtttctggtactgagacgagaaaacctgcactgtttcccgtccgtttcatttcatgctctgttgcttggcgccatgttttacccatttgagtaacatcaggcagtgcattggaggaagatgttgaagaaagcgcaattttgtcataacaatctaaacgaattagctgagatgattccaaacggcattgagttaattcctcaatcattttctgattaagattattttcggcctttcccggtgaagtgaagagtaaagggagtaatgtgcagaaaaagattttcaatacgttcattttatactccgtatttcttcaatttatatattaacgctcgtttagaaatactaagctgttctgccatggcgttaatatctcctttcaattcttgctgtttatctaataaaatttctttttcataattttctatagcaacttctaaatcattaactcctttgatttgtatggtaggaagtgcaatagtcgctacagatgcggttaatttatctaacgtttcattaagcgtggtttctttttccctttgtaattgattgatatattgcaagtaagagattttttgttgcatatttgataattcaaaaagatgctttaattgatgattaaatagttcacaataaatagggaaaataccttgctcgatattttctagctcttcagcttgccctaaaagaataatcgtgccacatgctttatggttaacatcatagataggcaaactatacaatccggtgttcaccggaagctgtgaaataaaaccgcgcatagcagcattattaatataactaccttgttgtaagttttgccaaaatacaggttcacccttaaatagcagttgaattaaagggtgatctgcatcggtaatatcggtatctaaaaaatggctttgcacttgaagcgttaagtcgatattccaactttccaatttattttcagctttattcattaacgaaataattaacccactcagtgagctacgaaaaaagctatattttagaaattgaacagctagcgtctctacatcatgacattctagtagtgcaagcgcattttttagtctcgctttcattgcttaattaacctccgcaataaactcatcattttcagtcgctaagcggatatgagagatagcttcattacgtgcactatattgtagaagtaataaagaaagaggcggcaataacgcaccatcaataatagattccaaaatacgcgcaccattttcagcacgagaagctctgcgtaaaatttccgtagcaacactctcttctacattgatttctgcgttgaaacgctgttttaacaggttaataagacgagctaatttgccatcaacaatttgtcgtaaaacctctgcaggcaacggtaaataagggatcacttccattcgagcaagtaatgctggtttaaagaaagttgttaattcagggtagagtgcatcttctagttcgtccggtttatccgcgtaagcagtaatgacatggtcacctaaattagaggtgaggaaaaatgcgatatttttacaatcaatgactcgtccttctccatcggctatctctcctttatcaaaagcttgataaaatagatttagcacatcaggatgcgctttctctacttcgtcgagtaaaacaactgagtaaggtcttttacgaatagcttctgttaagatccctccttcaccatatcccacataaccgggaggtgaaccaataaggcgagaaacagtatgtttttcttgaaactcagacatattaatagtcgtgagatattgtgtgccaccgaacattaattgggcaatttggataaccgtttctgttttacccacgccactaggacctgctaataagaacgcccccagcggtcgacccggtcgacgtaaatcagcccgcgctgtgagtaaatgtttgtgtaaacattgaatggctaatgattggcctttgatactctcttccaagtaggtaggcaactcagtgacaattgataatgcatcttgtgataatcgatttaatggtactccggtccattcagcaattaccgccgcaatttgttttttatcgacgtgaggcgaaaccagtaaatgcgtgtcgtgtaactgagcaagttgtttatctaattgttgtaactgttgctttaattcttcagatgagcaggggggctgtgctgctattttttcatcattatcttcagcatcttctgcttcactataagttcttatatcacttaccacttcattatttgcaacatcatttgcgacatcgtcattagtcgcttcggtagcattattaagtaatgttgctcgtaaggtaataatttgagatacaagctctttttgttgctcccatgcttgctgtaaatcagttgcttgttgctcaatagcacttgcttgtgaggctaacgtttcaagacgctcagaatgatcatctaaacctaaatagtgttctctttgtaatacatccatttccatattgatttggtggagttctgttttcaaagaggataatgcctttggtggcgaagatagattaatcgcggctcttgcacaggctgtatctaatacatcaatggctttgtctggtaattgacgtccagagatataacgttcacttaattcagcactggctcgtagtgcttcatcatcaataaagacatggtgggatttttcatagatactacgtaagccacgcataatgataatggcttctgcagatgatggctctttgacttgcactaattggaaacggcgcgctaacgcggcatctttttcaaaatattttttgtattcgctccaagtcgttgctgcgatagttcgtagttctccacgcgccaaagccggttttaataaattagaaacatctaagccaccttgctggttacctgcaccaatgagggtgtgtgcttcatcaataaatagaatgatagggtgaggagattgagtgacttcttgcataatgcctttaaagcgtttttcaaattcgcctttgactgcagcacctgcttgtaatgcgcctaaatcaagagtaagaagttcacaacctcttaatttatcaggaatatctccggcaataatacgtagtgctagtccttcaattaacgcacttttacccacaccgggctctccgactactacaggattgtttttacggcgacggcacagaatatcaatcattaagtcgatttcattatcgcgacataagaccggatctaactcaccatttcgcgcttgttcagtcatgttatgagtaaatttcgctaacaatgaatcagcggcaaggttacctttttctgatactgttttttcgttaaaaggcgattcagcagagccttcagtccattgatcaaaattgagttttaattggtcgcggttaatctgcgcaagcatatcggcaacaggtttcgcaagataacgcaaaggcatttgtagtaaagttaaaaacaatgcaccagagcgaagttcactgtgatttagctcagttgacgctaatagccagctatctttcatccattcgactaataagggtgaaaaactaggataactttgtgtaataacttgatgtggcggaatgtcgatatctaataactctgataacgcattaatatctaatgcgcttttttgactgatcatacgaatgtcagttaatggcgtttctatcagtttttgtagaaactgagcaatcgtaatttcaggttgctggtggcttacacagtaagcggctgcactttctaaggcatgcttagctattgggtgtaatcgattaacgagagtagagagatcaatttggatcataatgcgtcctagccaagtaaagtattaagttgttccacaatactgagtgtttgataattcagtctggatgaataaatgctataaataatcaacgcgaataccgctgtacctatgagaatatagcgagcccctaaacgcttacctaaacgataacggctttgttggttatcacctttttcaaatagaactattggcttagcgttacctcttagctgttggatctgtttttgtaagcgtcttaataaatgattaaattcatcattttgtcccgcagagactttgtagcgcccgcggtatcctaggcataaacaaaggtagataaattcaatcagatcgaggtaacgcttaggttcacctaataatctttcaattaagacaaagactttttcaccaccccatgattcattatgaaaatgaaccagtaatgattgttttacccaaccattatcttgatcccagcctaatccaagggcggtttcatcaataaaagtacatagcacataacgaaatgaaacaatggcacctggctcgtaaccttggatctgtaattgttgctcaatagaggtaatatccatgacaacttgttggtacagcttttctgaaagtggggtttcagacatcgctttcatgcgcaataccatgcctaataaaggtgtagcagcatctatcattggattgatgttgtttcctcttagcggcagttggtaatttttctttgtaatgcgctcttcatcatcatgattcagtaaaatatcatcagtcatagagtgctccatctcttattgcccataactgaatatcgagatcggggaagtttcctgaaacgtggaatgcgatgttgccatcctgctggatccctttccattcattgccttgttgatcaaaatggaaatagttatatcccgagtgataaggtaattgtcttggtgcagccgaaagtggtgataaaggaacacccggtatttgcacactaaccaagctgcgaatgttattgattgttgtcaccttagtttgttgtgggaattggcgacgtagttgctcttgcggcatttgtgatttcaccgcaataataaattcagctcgttgtagcagttgtttgtcatgaatggttgctacacgaataccatgctcttgaacttgtagcgggattgggatcgctcttggtgttaagacaacactgagtgcttcgcggatactggctattaatggaatataactttctgttaatttagcatgttgatatttggcaatattttcaggtaaacgtgaagtattcgtgaatgtttgtagttcaccacaaagctctaataaatctcgaaatagtttttcaggatggatcaccggctcttgagcataatgcgaatagagtggataagtgcgattaagcacttgtaacatcataaattctgccacatccgcaacaccttgctgacctggggcaccaatgcgagaggcaatttgttttcctctttcatatagcgttccttcaagctcggtgagaaattggctcaataatgttgaggcacggatatttaataggctgggaatataatcattatctagcgttaaattaccattagcattacgctctctaatacgacagataggtaaagcaacataggcatctaaaccatgtttaccttgtttgagtattggtgtgagctgtgcaacatgaatagcactgatatcaccattttcagtatgtaaatcacgaatattttcggtgctttcgctgtagcgagaaagtaaacgactaccgttatgttcagtggaaatttcactgacattctcgttcattaaaggaaaagctagataaataatactgctgtcactatcagtaatattcgttatatcaataggctgtggtagtaaatcttggtttggtatagagaaaatggtgccgtctggcataacaccagaagcttctttaataccaatacgacctaaagcatataaatcgtcactcaattttaaggtactaaatccccaaaagtgtgaaaaaaagttatttaaaatactcaccgtcatataatcttgatgacgttgttgttgttgaaaatgttgaggtttgataaatagcccttcacgccagatcactctatttttagttgacatattaatcatcctcttcttgtctaaattcgatttcattttccctaatgtgcactaataggaagtagtggcgtcctttaccacgcgctttgactattttcttccattctgctttatcaggatctgagtaataggcaataatgccaatgtaacggttagatgggtctaacgtcatagtagggaagggtttatattggccaggtaaaatggtgtagtcttgatggtcaatataatttttctttagaactttctctaagtcaccctcttttgcatctatctgatcatgatcaacagagccaaatactgaatcttcgttaagataaacaacttggatatttatcggcgcagcttcaccttcctgattaggattaatatagggctccgcaaggatggttaatgcaacggtagagggctgatctttcggttgcccaacaggagttgagggatctaataagattttccccattttacccgcggcttcaaaaggtttactacatccactcaatattaaaaaagagctaaataacagtaatattgagaaagttctaagctgcatattaagcttcctctattccttttctcagcgctctgtcataagcatggctgtatacttcatagaataatttttcaaaaccctgttgccgagatgaagagagttctttgtaatagttgttgtacatttcccaagcccagccatcattcattggtgtgttatctgaagctcgtcgatactgagaaaagcggtttaataaatgttcaggagagaatgctgccaacatggttgatagtgcggttgaaatagcttcttgattcgcttgataatgcaattggatgttgtgcaagctttctgttactgccgcaggtgctgaaagatgtacagggctacgttcatcggtaaacatcaacttcattgtctcttcatagccactattaagacgtagaggattatcttcaattgggcgtaattgcttatcttgtaagctttcttgttgttgttgcaaaatcagtaaaccttcaatagccgctttgacggttttacccagttcaacaagaaaatcattagcatgctgtgtatttgttaaattaaggtggatacctaatcccttcatcagagggttaaccgccacatgatcgacatcggtcatatgttcgttttcattaggtgtgattttaggtaaatcaataaattcttggaccatagtattctcttgattatctgatgtcggaaaggcagatgaatacgagtgggggtcactcaataaaggatcgtctgaagtagcttgtgtgtttttagaaattaagcttagattttcgttttctaaagcctgtagtggatctgttgttaatgcaccctgaacggttggtacaaacggaggctctttccgctcatttttgactgttgtatcaacatcaaataatgaatctagcggattatgatcttttgcgataatagactgaggcgtcatcgccatcatattttgtaccggctctccggtaagactaatattggtggcaataactaatttacccacttttatctgatcaccttgggtcagtctaacggcatcaagatgcaatggaataatcgcattattaatgtaaacaggacctgaatttacttttaagcaaaagtgttgatctttccaaaacaccgtacattgccgatcggcaatagcaccttcattatcttggattttccagtcacattgattgccactaccaatctgtccgctactttgagttaaagtcgcatttggcagataaccactttctagctgttcactatttttgatgctaaaagaaattgttggctgatatttatccatctctttattccaataccgtaatggtgacatccggtttctttgcgggttgacctaaaaagctttgccagcctaattggttgtgttgttggtgacccaaacggaacccttcggcttgcttttcagcaatgctaagacgtaaatcccaagctaattgctcatgaaaaatgtaagaaacaaaggcaactaatggtgcgaaatcactgccgttaggtaaaaaacgcatatagcgttctaaacttaattcactgatttcgatggtgcattttccattgcagtcatatatgtgtgagcccagactaaaattttcccctaataacattcgtgggcgagatttttgtccggattgatgagaaatcgtacctaacttgttttgttgtgattcaggaataggaacacggcgtgtctcccaaccaattacttttacattttctaagtcgaaacagtgagatataagactactaatcacatcagaagagcgacttggactcgccaaaagaccagcataagcgagcattttgctatggttgattttgatccgaccgcgattagctccattacctaatccaacgagagaaaacatatattgtgaaaatgaatcctgaccttcattttcaaagcaaatgtagtaacgatatttgcgccagatccgataaagtaacgctatcagacgatgattgaagatatcgagaaaagcggagataccttctatctgttgtgcatcttcccaagcaaactcatccagataatagcctggtaggggggactgacttccttgtaagcctaaaaaagcgacttctaattcatattgttcgacattatttttttcaatggaaatgacatctcgcgtcggaaatgcaatatttgaataagatttaaagcgaagaataccgctgtcatcctccatcgagttgacatcttgatgaattattttatttaacaattcaacgagttgataaaaattatactctgttaccgatgagccagcttgttccagccaacgatcgattacttcagtatgtgctggttgatttgtgctggccatcgataaacttccttattatcaaggttaataacttccaactcatgaaacatattaatgctggtatataaggtgaaaaattgagcgataacggtacaaaataggaataaacttccttctgaaagaaacgcattttgatgaacaactaacgttgtcttcagaccgcgaacaggaaggcctttgtagatatgctcaatatgctctgaatgtaaatcaactaatgcatctaggcgtttttgtgattgccttgcaacctgtgtgttataaacagacggtaaatcatagagttgtaatattttttttaatgaatcaagattgagcaaagactgataatttaaagataaattagttaattcagaccaatataatgttttatctaataatggatataaaggcagtgttggtgcgaataaattcttagcagataaagccccataaggcattgatgcactatctaaatcgatagaacgcgtcgataactgggaagcgatatagcggttagtacagttgagtgcaacagaaacggtttcttcacactgttgtaactgaggctcttgctgacgaacaaaagaaagtcgatgggaatagccgtataactgttcattttgacttatctttaaacggtaatagccatgattttgagtctgatggttttgatgataaaaactttcaaatgctgtataggtgatcggataaggtttagcatcattaggataacgtaaccctctaacctcattaatcgaaaaaatatcaaaacattcagtaagttggtaattaggacttaaaacatactcctcacttttccccgtcaaatttattgcttcactatcaataggaaataaattcacaataggggtgcaattaagtttaatactgtcgtcgtaaagaataacgccatcaggaatttctagatcaaaattgatcaccagtttgaattgctctgcttcgatagccaaaggaatgtcatccaaaccatgaatatctagaaagagaaaggcttcaggaaaacagaaaaactcttgcagtatacgatagccatcatagctatttttcgggtatggaagtaaggcatcctgcttttgaaaaccaacaggcgtaactgaaaagtgagtaagaggtagcgtatgtacatctgtgactaaagaggcactctgcacatgctggcttaataaaaaatagagctgatttgtagtaaatggcgcaccatttaagtaaaaacacaatttatctaagccaatattggcaagtggctgttttgttgctaactcaaatgttatttcaatggcggttgtttgctgcaaaatgttactgatttttgtcggcattaaccagaggtcgcgactttgactaaatcgacattgaaataacgtctcgtggtttgtttcctcactttgcacataaagtggagcggcactaaagggttgtcctgctgaaatttttgttgcgtgttggcactgagcataattaggatgatattcaacaatcgtcatgcttggcacagggcgtgcgtagtttggccaaagcatattggctaaactattagttaattcaggaaattgtctatctatttgctggcgtaaattacccgataaataagatagcccatccataatccgcgaagtatcaggatctttaacattgtgcgaaagcaaattaacaagttgcggtttttctttggcaacttgttcagtcagctcatttaagtattctgattcattggtaaagtaggattttgatgacatattaatgctatttaagctgatatctacggttattatctaaatacacattaaattcaataagttgctgcttattttctaaatcaataaaagcattaatattaaattgtaaagataaactatctgcatcttcttcaagaaatttcactacaactttgctgatccgtggttcatacgcaataatgcaactactaatgctatcttctaggtgagatttaaaatcaaccgtagattgagtcgcatcatttaaatcagggatccctaagggtggcgttccttggcaaccatcaggtctagcatttaagatgtaatttaaattctgttttattgattcaatgagtgtatttgttcgcgaacgatgggaaaaacctaagtttttccctcggatccgttcaaataagctggcgccagcattagcctgccagccataattggatgccatcaccgttactctttatcaagacgaccaacaagtgataattcaaagtttgcacccatatatttaaaatgtgggcgaacttgaatagcgacttggtaccaacctggatcgccatcaacatcaagtactttgatttcagctgaacgcaatggacgtttactacgaacatctgctggtgggttttcttgatctgcgacatattgcttaagccaaatattgagttcacgctccagatcttgacgctctttccatgagccaatctgttcacgttgcaatacttttatataatgagctaagcgattgataataaacatgtatggcaattgagttcctaacttatagttagtctctgccaatttgccttcaggagtatttgggaagacttttggtttttgaaccgagtttgcggagaagaatgcagcattatcactgcctttacgcatggtcagcgtgataaagccttcttctgctagttcaaattctctacgatcggtaactaaaacttcagttgggatcttagtttgtaattcacccatcgcttcaaaaatatgcacaggaagatcattaactgtaccgccgctttgtgggccaataatgtttggacaccaacgatattttgcaaaactatcattaatacagcttgctaataagaatgcggtattaccccataaatagtgctcatggtcttgtttaacattttctgaatagttaaacatttttacagggttttctgttggagagtatggcaaacgtaataagaaacgcggtgctgttaaccctaaataacgggaatcttctgcttcacgcagtgagcgccatttagtatgtgcagggccttcaaaaacagattttagatctttaattgccggcagttcagcgtagctattaataccaaagaaattaggtgaaacagatgataggaatggcgcgtgagccattgcaccaacagtactaacatactgcattaacttcatatctggcgcagtattgttaaaggcgtagttaccaataactgttgcaacaggttcaccaccaaattggccgtatcctgaagagtagacgtgttgatagaagcctgattgaacaatttctggagaaaattcaaaatcttctaataactcttctttagttgcatgaagaatattgatcttaatattttctctaaaatcagtgcgatcaacgagtaattttaaagaacgccatgaagcttcaatttcttgaaatttaggcgcgtgaagaatttcgtcaacttgagtacttagtttattatcaagttcaacaagcattttatcgattaataatcgattgatctgttggtcttcagattcactggcgaaaatattactaataaaagcagcaacaccttgtttggcaatatcgtatgcttctgtttctggagacatacgtgattgagccataatttcatcaagtaaagagcctgtagatgcgggggcttgttgctcttgagcttctgcatttagtgacatgaaataatcctctataaacattatttttgattagcagcaatatcgagctcttttagaagctgttcgcgagtttcttgattttcaagtagttcttgaagacgctttctaaaagctgggacattgcctagaggaccttttaatgcaactaaagcttcacgcaattcgagaagtttatttaattcgggcacttggcgagcgatactatcaggagagaaatcctgtaaagatttcacatcaagattaacattaagctctgaatcactgctttcttctaaggtattgcgaacattaatatttaaattaatgccagcactttccataacagaattgaagttgttttgattgactgaaatcgctttgcgatcttcaatgggggtctcttccgttttacctttcatatccccaacaatcaacatattcaatggaagttcgacttcagcctgagctccgccagtatttggcgtatatttaatattaatcctttctttaggggcaacactaccgagatttttcttactcatttaagttaagctccttgtatgagtatgcaataacttcttaattccataaataaaatgcctaaattaaaaattaataataaatttagagcatgcacttccctacacagaacaaaacaggctctgcgttaagaattcttttcccagtaaggtgtttaaatatgtttaatattgtacaaaatttattttttagttttggtcataatatacaaaattaacttagggtcaataggtaatttattatatgagttcttatttttatattaaataagctgagagcagtatcaatagggcatcttatcgggataagaaataagtttgactataattatgaaagctaacttattcggtggttactctaataatgagtatctaaatgatatagctaattgcaatataaattaaactcaatttaataaatatagaatatattaatttataaaattctgtgagctaagttcatattttacaattagtaatataatttcatctttttctagcataattacttattttatctattttgcttgaaaggttatttcaattttaggataagttagcttttactcattatatttgtatcacgatgatggatacatattaaacaagcctttttggatattggtgatgtttttatattttgctttattttcaatatcttatggttttttaagttaaggcgttaatcttgatttaagagcaataaagaggtttttttgagatatcaatttattcataggaatataacgtgttagaaaataagagggaataataggttttcaagccctttgtgacgctacatattgatatattaaaaataacatatatataacgagtatatgataaaaaataaaaacgcaatgaaactatttaggtgtgaattagttttttatggcaacagaattgcaaacataatacagctatatttggtttaacttaagggtatggtctgaaaaatattctgctttaataaatggatttttaattttttagtacgatgtatctcttatagtgagtaagaagatggtgctataagccaaaaaagactaaccataaatagctaaataactatagagatatctttattgttatcaaataagaggattacctatttcaatcaaggataaatactaatatggctcaaatagatctttaccctaatatgatatgaaaaatcttctctcaatattgctactgtaatgagtatcgcttcttaatttatactggaataacagcatatctttatcatcaataagcaaagaccaagatagttaaactaaaacttttgtgtctccctatccttattttctacttgttcattgtatagttttataattagcctccataaaatgagtattggtacgtaaaaataagactgaaatatacgcatattgagtgtgttaaataaaaatagtggcttaattagcatgatattttaattaaattgagcttaacagctaaatatattgaccaatttggactgctcatggagaaaggacagtataattcaatgtaattgatttttaatactttaaaatcaatggattatatgcgctatttttgatttaacatttccgttacaaaatatatttttatgtacatagtgtttcttgggttgcgagcaatttgtctatttattcatcatattttatgctgataaacactttttatgactgtttttacagcatgatatagcgatatttcaaccagtttacgctaagtgacttatcctagagagatacaaaaaaaacgggctgtttacagcatattgataagattttattatcctttaccgaagtcttaccgtgcgcactggctaagatgacagacatgactaacggattgtttttaagacaatcatttaatttaatttgtcgtttttgataaaaggatattgttatgccaactccttgctatatttccattgaaggaaaaaatcagggcaacatcactgcaggcgcgtttactgcagattctgtcggcaacatttatgtacaaggtcatgaagaccaaatgttggtacaagaattttctcacgtagtgacggttccgactgatccgcaatcaggccaaccttctggccaacgtgcgcataaaccgtttcgttttaccgtggcattaaacaaagccgttcctctgctgtataacgcattggcttccggcgaaatgctgccaaaagttgagttaaaatggtatcgcacgtctgttgaaggtaaacaagagcacttctttaccaccacactgactgacgcgacgatcgtgaacatcgattgccaaatgcctcattgccaagatccggctaaagccgacttcacgcaacttatcgaagtctccctctcttaccgcaaaattgactgggagcacactgttgctggaacgtctggtgcggatgactggcgtgcgcctctcgaagcgtaataccgttatgacgagtccttgggggctcgtccttattttgtattgttcccttttctttatccatttttgcatggaggcagattatgcttagcaaagatccgaaatcaacgcccattgacccggcatccgttttaaaagatgaagccatcaatcaagtaaaaaatagggtgcaatccaaagtgaacgaaacgctatcgacacccacgcaaaaggtggccgggatggcctcagcagcggcctcgctcacgcaatcagccagcgcatcggccaatagggtgacggctcatcccctgatccacggtggcggttttaccggtggacaaacattcgctgaaaaccaagcactccaagcggcccatggggcgttacttgatgcattaggcatggacagcctcgaaagtggtttggtgttcacttgcaccattggtggattgcctgacgacacctttcaagtcaccgaatttaatcttaccgaaggattatcctcgctattttcactgtccatcagtgcggtcagtgccttaccctttatcgattttcagcgccatcttggcttagcctcatcattaacggtcaaacgtgatggggtgttgatccgcaaagtcaacggtatcttagccggggcagtacaaggcaataccgacggagtgaaaacgtggtatcacttcgatattcgccctgaaatgtgggtgatgaccctcaatcaagacagccgtatttttcaacatcaatcggtgccgaccatcttaaaaaccttattggatgaggcccatgttaaagcggattgccaattctaccgtgaagatctacaccctgaacgtctctacaccacccaaaaacgcgaatcggcatttgatttttggtgtcgactggcgtttgaagagggcattaacttctggtttgaagaagaacaactgttttacagcgatgaacatatggggatgacggcgggtattcacctcacctataacccgcaggccgacaccgatatcagcgatagcactgccatgacttggcaatatggcgaatatttgtgtgtggatgaaactatccataaagacaacaactttgtgcgtccttcttatccgttgtctcatgaaaacaaaattgagcaggggggacagcacagtgtgtttgaaagttatggtcgttttcaattagacgatgaaggtcgacctctgacacaggtgcgctttgagcaattacgtaacggcagcaaagtggggcaagcgacaacaaactgttttgcgctgatgcccggcaaaatcttcaccttatctcagcatccccatcagccgatgaatgatcgctggcaagtgatcagcgtcagccatcatggtgtacagccactggcggacaatagcgggggcgaaggcacacaactgtcgaatagcgtctcctttattccgggcacgcaagagtggcgtcccccttatcgttataaaccgacggcggacggcgatgaaatggcgacggtggtaggaccaccgggggaagaaatctacgtcaatgaatatggcgccgtgaaagtgcattttcattgggatcgtcggggaagtgccgatcacagtgcttcatgctgggtgcgggttgccatgggttggagtggaaatggttatggtttttctgcggtaccgcgcatcggcacacaagtgctggtcagttacctgaatggggatatcgacagaccgataattaccggttgtacctatgatggtcgtaacgcaccaccgattaagttcccagagaataagacacaaaccactttccgtagccaaacccacaaaggggaaggttttaatgaactgcgttttgaagatgcgggcggtaagcaagaggtgtttcttcatgcgcagaaggatatgaatactaaagtattaaacaatagaacaacgcatgtacttgcagatcattttgaagtagtcgaaaaaaatcaaatgatcaaaattacacaaaatcaagatgaagaagtgggtgaaaataagaagttatttgttaataaggattatcagcaaagagttggcgctaataaaacatctatagttaaacaaaacattaaatatgttgctggggattcatttgaaattgtatgtggtaaatcaacattacaaatggataaagagggttatattcggatccgaggacatgaaatcataattgaaacatctggagatcaatatattaaagccgatggagatatcacccttaaagccaaaacaattttaggtaattaatcatgacaaaattattaactgataataaaataccatcacaaaaatcatccttactagatgagataatcgaaaggacagaacctcaacctttatcgggtgagccttcaatgcttccctctatccaattagcaaaaattgttagtaacagtaacgaaggtatttctattacatttaatgacaatgaacaacctattttagcattgagtttagcgccaatcactgaatctgatgtaggcaaaatatgtgcgatccagtttattaatggaaatcagaataacccattgatcgtagggatgatttattcaaataactatttagataaattatcaaaacaaataataaataatgcgacattatcatgtgttgaacaagaccaattacatatccaagcgagtgagtctattacgttacagtgtggagaatctagcttaacaatgactgctgatgggtttgttcaaattagggctctttatattgataactatgcattagccacaaatcgtattaaaggtgcatcagtacaagtgaactgaaggaagataaacacatggagttgataaataatgctaaacatacagttgctaaagcgacagtaatgattgataaagctgggttcgagtatctggttgttgtaataaaagcaacttatcatattccagaaaataatcagcttccacgtcctattattccatctcaacccctagtctattcagatatatattatggagaggtggggaaatctgcgccaatttatgatgctgactttgttttaaagaaacaaaaatgtgatgtaatttttaatgctaaggcatttgcaccgcataaaaaacctattagccaactgattatatctgttcaagttggagatatgataaaaaagatcgcagtttttggtcaacgtaattggtgtaaagaaggtggcctttataaacctggagtcgcagagccttttactgaggttcccttacactatggggttgcatttggaggaaaatattattacaaagatgagcagatatctcactctataaatccactgggaatagggtattttttatctcgaaaaccgaataataaagaaataaaaatgcctcaactagagtgcattgatgaacaaataaatacacctgaaagtcaaattaatcccattgcattatccgtattacctcgccattatggtgaacgggtaaaatatgcaggtacttttgatgaaaaatggcgtaacgaaacagccccctttttaccaagagactttgatgaacgttattttcaatctgcaccagctgatcaacaaattgattttcctattggcaatgaagtgattgttttaaacaatatacaccctttgcgttcgaaaattaattttaaactaccaagattaaataatatcccagtaagattttatcagcgtcaaggggaagtcgtgttattcaccccaagcgttgatacactttattttgaaccagaaaaggattttttttctgtaacttggcggtgccaattacctattcaaaatatactcgatatagagcaaattcttataggaccaagactagatagttatgtttctcgtcaaacgtatcaatctatttgtaagggataaagatgaaaaataaaaattatttatccattgttgctgctgggttatgtactcccgttggtacagatatttattcagcaacagcagccattcgttcaggattagatcatttccgtgaaactcattttcgagatacgctaaatcagcctattgttggctctttgttatatgattatcaggtatggggacctgctcgattaattgcgttattaaataaagtcattgatgattcattggcgaatattgctatcaataaagaaaatattgttatctgtttacttttaccagaagaagaacgtctaggtattttcccacaatggttaagtatagttactgacgctatattgcctcgctttcataaaagctctatcgcgttatgtcgtggaaaagcaggtattggggaagcgttgccttttttacagcgaatattatcagaaaaaaccactcatattgcattattagttggttgtgatagttattttaatgcagaaacgattcgatattatacgaatacaaatagattattgcattcggaaaatagtgacggttttattccaggcgagggagcggcttctgttgcatttacattaacaagcaataataatagtaaagaatacgttactattcttggttttgatactcaattagaagtagctcatattttgcaaactaaattgcctttaagagtgaaaagtttatcaaatgctattgaacaagcttgccaacggtcaaatcttcttttacatgacactcaattttgtatgagcaatgcaaatggtgaagctttttactttaaagaagttgcgttagctattacgcggacattaaaagaaaaagtagaacattacccccattatttaattgctaaaagtgtcggtgaaacaggtgctgcgagtagtgtgattatgttagcgatattatcggagtggatgaagcaccctgaaggacccgggaatactggattgataatatcaagcgcggatagcggagaacgaacagcgatcattttacaatatcaagaggtaaagtagatggatacgcgagtttatgttaacggacgagaaatttgctctaaagcatccgatggtgtatcaacggccgcgtttccagatccttgctggtctcctggcccctcagtggttccttatcctaacacctctagcgcagatgctttatcaaatggtacagcgactgtttttatccgaaatagtatggttgcacaagaagatcgttcattcttttctattagtacaggagatgagccagcaactaatgggttagccaaaggcgtgataacaggcgttattaaaggtaaagcctattttcggtcatggtcacttaatgtgaagtttgaaggatatggtgttgcacgtcatcaagatcttatgtcacataatcatggctcttttccatctaacacaccgacatttccgtatatttctcgaggggttttgggcggtattaaagattgtagcaaagaaaatacacagattgaaaagcgctgtaaacccgataaggataactcggatgtccaacaagagttaaaaaaagaaagtgcgcttagaaaagcattagcaagaagaaaaaaaatacaaaataaaaaaaatagcaataaatggcactggacggaggatcattgtgctgggttagaaataaaaatgtcagggaaagatcctaaaaaagttgctaaagagtttatggatgatatttctgattcgatagacgcattaaaaagcgaattagattatgttagtgcattaaaaagtaaacttactgatatggcaaaggatgccgcatcaaaagcattcggtaaggtaatcacaaaggctggaataaaacaagtagcaggtagctcagttccaggttggggaaatgcggcaatggccgcatggacacttggtgatgcagtctatgcaggttttgaggttagcactattaaatcagctgctgaagagggactagaacaagttaaagtcttatctgaaaaagcggatgatataaaaaaattgatcgaacaaactgaaaattataaaaacttatcacctgaagagcagctagaaaaagcacaaaaattggctgaagatgcacaagatattcttgctagcttaaatgcttgtgttcgagcaagaaaatgcaatttagtcccttattctgtaaaaaatgcgataaaaaaaggtgccagaggaagtaaagtagagaccgcgaaaaaaggaggatgttgccaaggacaaacggggcatcatttaatttactctcatttgttaagagagacatgtaagaattatgaggagtccatagcccctactgtttgtgtggaaggtacgtcttggcatagtggtagtcatgggcgtattcatatggcgatggatgatgaaattacttatttagttgaaaataatcgattaaataataacactatgagtatgcaacaagctattgatgctgccgttaatgcccataaaaaaacgtttccatatgctgattgttccaatagatgtattagagctcaattagaaagttattatttatcaatatgcaaagatgcaagattacccgcgaaagactcgaggggtaataacataaaatataacgaactagataggtgatttatgacatatataaaagaaaaaacttggaaagaggttctgaaaggttggataattactggttgtgcaatccgaaataaaaatattgtgtacttttgtttgcgcaaagatattccatacgaaaaggctcgaaacttatggaacagtgaaatacctagtatgttattagctatctatttagatacaccagtcacacctacagggtatgcgagtattactggatttgataatcctaaagtaggtgtttgcttaaaaccgaaagaacaagggatgcttgcatctagaggtgatgatggtgttgtggtgtgtgtaggcagtggtgctaatttgccaccagaaaaagttatggatggtgactatgcaaaccctaaaaatattaaatgtgttggtggatatgcttattatgttggctctgcacgcaaaatttataaacgtgtggatattgggaaatggcagagaattcaacatgggataccaggaggagaaaccaatacagatatggggttcactgatctcgatggtttttctgagcaggatatgtatgccgttggcggtgaaggcgatgtttggcattataatggcgaaatctggatcccctgtggttttccctctaatgagcaattaagtgcagttttatgtgcccctgatggttatgtgtatattggcggtgaagggggcagtttatggtgtgggcgtgaatatcaatgggaaaaactttatcacggcagttcgactattttactgaatcagttacgctggtttgaagataaagtgtgggcatgtgatgactaccgtttacagtgttggaatggtaaagaaatggtccgtcccaaggatggtgataaaaatgttatcgcctcaggtcatatggatgtccgcgatgggattttagttgtagctgatgattataatgttgatctgtatgatggaaccgcttggcataagatagtgagaccttataaataataggattattgagtggataaattatgtcaacaattatgtttccaaccccacccccgataattagacagcatctgaacaatgcaatcttttattataagactttgtatgaaagtcgttattcgtcattaattaatgtggataaatttaattattttaatgcattattaaatgctaatgttgatggcttatgttgtgcaaaagaaaaaggtttagatgaagctcgaatcgcactattacgttggaaaggacatgaggaagcttttatctatactttactttttaatgagttagatagtgaaaaagagtttgatcgtttttggttgatgataaaagaactaggatttaatgctgttattggttcgttggaggcactgctccgtgttgagataaacgctagaactgcacaattagcactactgaaagaacgagagcctgacatattcattgtcgctttattaaaaataaaagcacatcatcaggagctaatccatcatgataaattattatattatttaaatcttccctcaaaagaaattaaaatcgcattatgttattatgtaaaaaaaatgaagctaataagcttttccgaaaatattagaatgttagtaaatagctcgacagatattgctgtaaaatatgctgccatagatgcgatgtgttggctttcaaatgataatgaatataattatatagcgttatctcaacttttaccattatatttggaagagaatacacctaaaggaaatcaaagcttaattcattctcaaaaaatagaaaacttagtccgtttaatgggatgtatatcgtccactaataataaattaatagcacctccgagtttgtatcctgaatatttgaatattatttattatactcattcatgtcatgcagaatatcttcctgatcttatcaattatttagataaccccgaattatcgaggctggcttataagggaatttgtattcttacaggtattgatgtcaattcgcctgaattaacatactcttctcctgaaaaagttgaattagctgtggatagtcgagttcgtttcctttcttcaggtgttaataatattaatattaaaaaggttaaagaaaccataaagttattgaacttaaaaggaaaaattattcttggtaaaccagtatctattcaacattgtgaaaagattattaaaaagggttatcagcttgaaaggcatatagcaaattggcatttatgtcatatgaataaagaaaataaatataatgatttttgtttttttaatcgaattaaaaataaggagttgatatgattaattatccagatttaaataaagataatattcgctatcaatcagcttttggaaaaaaattagtaataagcttttgtgcatcttggtgtaataattgtgaatcatggaaagatacttttacgctactctctgaaaagtttattgatgactgttttatttggattgatattgatgaatatccagagttagtcagtgagattgaccttgatataatccctgttcttcttatacaaaaaaaagaggatatccattttttgggccccattaggccaggattggaaacaattgtgagtattctaaattcagataaagtaatgaaagttgaatttgatcccggaattagagattatttaattgcccccgacctccctaaaaggacgatatattaatttactaaaatgaataataggggaaagtaaccaagtgattgacaattgacgacacgggtaaagggcttgagaatgaaaatatttatccaaagcaccgtaaaaccccgtccttcaggtcggggataggggatataaggcgcggttttttaactaacgaggtgtttcctgttgctcaatgtactggcggataatggatattgctgcgccaccacaactccccgcgaaataacttggcgaccaaagaacccccttgtagtaatcacgttgggcaatatcaggacgatcacgtcgaagtaatcgactcgatacccctttaaggctgttaaccagattagatatcgccagttttggcgggtaattaatcagtaaatgaacgtgatcccgttccccatccatttcaaccagttcaacatcaaaatcagcacaaacactggcaaagtagcctcgcaatttttcaatggcatcctgatcaaatatttttcgcctgtattttgtgacaaagaccaaatggacgtgcatcaggaatacacaatgtctgacacggcgaatattagtttcatttttcatagaccaaagtataatagataatatgaaacgtctacaagcctttaaattccagttaagacccaatggtcagcaagagcgtgagatgagacgctttgcaggggcttgtcgttttgttttcaatcgggcattagcacgtcagaatgagaattacgaagcagggaataaatacattccctatacaaaaatggcttcatggctcattgagtggaaatctgacacagagacacaatggttgaaggaagccccatcacaaccgttacaacagtcacttaaagatttggaacgggcttacaagaattttttccagaagcgtaccgcgtttcctcgattcaagaaacgcggtaaaaatgaggcttttcgctacccgcagggcgtgaagctcgatcaatccaatagtcgtatatcattgccaaagttgggatggatgcgctaccgcaacagtcgtgaagtcgtcggagaagtaagaaacgtcacggtcagtcagtcatgcggtaaatggtacgtcagcattcagactgagtatgaagcgacagaaccacaacatgaatcaacctcaatagtcgggcttgatgcaggcgttacaaaactggccacgctttcagacggtacggtatacccgcccgtcagcagttttaaagtaaaccagcgaaagctggcaaggcttcaacggaaattaagccgtaaaatccaattcagtgccaactggcaaaaacaaaagcgcaaaattcaacgtctgcattctcatattgccaatatcaggaaagactaccttcacaaagtcaccaacgaaatcagcaaaaaccacgcaatgattgtcattgaggacttaaaggtcagtaacatgtctaaatcggcaaaaggtacgacagaacggcatggacggaacgtaaaagctaaatctggtttaaaccgctcaatactggagcagggctggtatgaaatgcgccgtcagcttgagtacaagcagctctggcgaggtggtcaggtactggcaatacctacaccagtcagaagtgcgcttgctgtggtcatacagcaaaggaaaaccggcagtcacaaagtcaattcgagtgccttgaatgtggatatacagcgaatgctgatatcaacggggcacgtaacattttagcggcaggacatgccgtgattgcctgtggagggagggtgcagtcagaccgcccgtcgaagcaggaacccgccgaggtgattcagacatcagtctgaacgcagtagggatccacgtcctttagggcgtggaggatgtcaatatcatgacatgtcagggaggcgtttagcgttaggaaaaatcgcccttggacagaaagtgttctatcaagatgaaggctttaccgtctatcgcacgacaaacaatcttttccttgttgaatcggcggaaggtgattatcaacttttcgaagccaatccacataaaatcaatacactgcgcttaatgaaaagtgctgatcgtcataataacgctttacactaccgctatgctaatgacggtgaattggtacaaattcatgatgatgcgtatctgaccgatatccggttacattatgatgaaatcacccaacgcttacagtcggtgacccgccaccaaggacaagaagaaaaaacgctggtcacttatacttatgatgcacaacagcgtttagtgcaagtcactaatgcggataagcgagtgactcgtcgttttggctgggatgatgaatcgggtttaatggccatgcaccaatatgccgcaggggtcagtagtcattatcggtggcaacgttttgatgcctttaccattgaagacaatgaacctgagtggcgagtggttgagcactggcttaaagacggtaaacgctgtttagagcataccgaactgacgtatgatttagctcaacgaaccctcaccaccgtggaaacggggggcgaaaccaccttccgtcgctggaatgaacaacagcaaattatcgaatacaccaatgcattgaatgaaacgtggtggtttgaatgggataccagccgcttattaacgaaagcaatagccccagatggcagtgaatgggggtatacctatgatgagcgcggtaatttaacccaatcgaccgatcccgaacaacaatcgacttgctatgattgggacaaagattttgcgtttcccacggcacaaactttgccaaatggggcggcttggcattgggagtacaatgagcacggcgatattcgtcgtgtgattgacccgcttggccatatcacgcgcttggcgtgggatgaccaaggcctgtgtctggggcaagtggatgctaagggtaatgaaacccactatcgctataatgcccgcggtcagttaatcgagcaacgggactgttcgggttaccccaccaccttgacctacgatgattggggacaactgcgctcgttgaccaatgcacagaatgaaaccacgacttacacctttagtgaagcggggttgttgttaacagagcgcttaccggatgggacagaaaaccgttatgactatgatgccaccgggcaattagtgggaataacggatgccggagagcgccatattctgttgcgccgtaaccgtcgtgggcaagtgatagcccgacgcgatccggcagggcattggttgcattttcactatgatactttcgggcgtatgcaggcgctggagaatgaacagggcgagcagtaccgctttgagtatgatgccttgcatcgtttaactgatgaacatgatcttatcggacaacaaaagcactatcagtacgatgtgatggggaatgtcacccagataaaaaccaccccggggccttgcgttgatacgccgatacccttatccccgcaggtgaccactttcggttacgataaagtgggacggttgctgtttcgagaaaacgccgattatcgcacggaatacctttatcaacctttgagtgtgacgttacgccgagtccccatggcggtatggcatgaagccgaacgcaccggcaccactgcccgcgtagagtatcaagacgccctgacctttacctacgataaagtggggcagttggttcgagaagccagcgcccgcggtgattatcagcatcactatgatgtgctgggtaatatcactcgcaccgagttgccccatcaacgggcatttgaatacctgtattacggctctgggcatttacaacaaacgcaatggcgagataatgagcaactgacggtattggcggaataccaacgagaccgtttacaccgagaaacgttgcgcaccagtggcgccttagacaatgaaacgggctatgactgtcggggacgtattacgcaccaagtggcgcgccaaatgaatacctcacagtttgtgaccccggtgatagaccgtcgttaccgttgggataaacgcaaccaacttatcgagcgcagtgtcagttatggtcaaacgggcgaggtttttaccgccggacattggtactaccacagttatcagtacgacccactggggcagttgacggcgcatttagggtcggtgcaaaccgaacactttctgtatgatgcggcggccaatttactgacccgtccgcacaccgaagcaccgcataaccaagtacaaggtagtgataaatttgattatcgctacgacggttttggtcgcatggtctcccgctatgaaaaaggcagtagctcggggcaacgctatcactatgacagtgaccaccgtattatcgcagtggatatcgaccaaaggctcttagggtatcagcgaggggaataccgctacgatatcttagggcgccggattgaaaacggttatggaaagccagtgcgattgccaatacaatgacctatcaccaacatgagccggataaagtgtacaaaaggctctagatgagatcctataacaactgaaaaagggaaagaaagataatggagtatataactaataaacattgggccaaatatatcaagggatatatttttactggttgtgcaatccgagataaaaatattgtgtacttttgtttgcgcaaagatattccatacgaaaaggctcgaaatttatggaacagcgaaatcccctcacagttattatgtatttatttagacacaccagatgacccgattgattatattagaattgaagggttcgataatcctaaagtaggtatttgtttaaaaccgaaagaacaagggatgcttgcatctagaggcgatggtgggtttgtcaagtgtatgggcagtggatctaaatttccgctagaaaaagttatggatggtgactatgcaaatcctaaaaatattaaatgtgttggtggatatgcttattatgttggtacttcgcgcgaaatttataaacgagtggatattggaaaatggcagagaattcaacatgggataccaggaggagaaaccaatacagatatgggattcactgatctcgatggtttctctgagcaggatatgtatgccgttggcggtgcaggtgatgtttggcattataatggcgaaatctggatcccttgtggttttccctctaatgagcaattaagtgcagtattgtgtgcccctgatggttatgtgtatatcggcggtgaagggggcagtttatggcgagggcgtgaataccaatgggaaaaactttatcacggcagttcggctattttactgaatcagttacgctggtttgaagataaagtgtgggcatgtgatgactatcgcttacagtgttggaatggtaaagaaatggtccgtcccaaggatggtgatagaaatgttatcgcctcaggtcatatggatgtccgcgatgggattttagttgtagctgatgattataatgttgatctgtatgatggaaccgcttggcataagatagtgagaccttataaataataggattattgtgaacatcaaggccttattggaacttacccctccagagttctaaagccttttcaccggaggaaaaacctccagcatatggcctattttgagtggttcaggtgctgtcagtttcaatgtcattcctcttaaggggatttagacatcactgtttttcgtaatgtctcgttgcttacaagtgttgcatcaagcgggttgataaattcctgataaacttcgggattaacatttatgactcgcagatctttcagtgtttcttcagctgaacgtcgaacggctttcaaaacaaattcagtatggttttttcccacagcacgaataaaacaataaaaaacccaacaacgtatctaattaaacgctgttgggttataaaacgtgttatttaactgtatgctttaaaacgatgaaaaagccattaaagtacagcgacaatggcttcacacaatggaaccatattttccagtgttaagcctgcgacattaatacgaccagagccgacaatataaataccatattcagcacgtagacgttcaacttgctctttattaaggccactaaatgagaacataccattttggtcaataataaagctgaaatcttgttttgcgcctttttcttgtaaggttgtcaccagcaattgacgcatacgctgaatgcgctcacgcattgtggtgagctcttcaatccactcttcttttaactctgggttagataaaatagtggtcaccacagatgcaccatgtgccggtggattagagtagtttgcgcgaataatcgctttggcttggctaaatgctttctcagcagtatcgctctcttttgcgacaatagtgcaagcacctacacgctcattataaaggccaaagttttttgaatatgagcttgcaacaatcagctcaggattgctttcagcaaataggcgtaagccttgcgcgtcttcttcaaggccattagcaaaaccttggtaagcaaagtcaaatactggtaaccaacctttctctgcggataaggcagccaattgacgccattgctctaacgttgggtcaataccacttgggttatggcaacatccgtggaacagcacaacatcacctgcttgtgcattttgtaggctagctagcataccttcaaaatctaaaccgtggctttcggcatcataataatcatattggcaaatctctaagcctgcagtctgaaaaatattattatggtttggccaagtcgggttacttatccatacacgtttagcattagtttgctgagcaataaagtccgcagcaatacgtaatgccccagtaccacccggagcttgtgctgtacgtgcacgtttttctgtgatgatagggtgttgttcaccaaacaacagtgcttgagtgaccgcaccaaactcaggaataccgctaataggaagataatttttagtggattcgttttctaataaatatttttctgcttttttaacggtggtgagtacaggtgttttacctgtttcatccttataaacaccaatccctaagttaattttgttttcacgagtatcagaacggaaactatcagctaaacccagaataggatcggctggtgcagcaatgattttctcaaacatagtgtaattattccctaagctcaaaacgaagccgaattatgagtaacaagagtaacgctatagaatcggtttgccaacagtttgtagagaaattagcaagaagttgtgaactaagtgagaataaatagcaaaacaagatgtaaataagtaaatctttcgtgattacattaacatgtaaatataaccactaaaaataaccaatagtttagtataataaactgtttatcttggtattagaaaaggaggaacagaaaagcgagcaatataaataggataggcaaataaaaaagcaacaccgaagtgttgcttttcaaatcaattaacttgactgtttaattaccttaaagggtaattagaactgataagtcagacctaaaccaactacgttgtcagttgcaacgccgttagctttagtgaagtcatcttcatctaacaggttgattttgtaatcaacaactgcagtcatgtttttgttaaatttgtagaaagaacctacagagatatatttaactaaatcatggttgttgtctttcagaccgccaacaccattattcagatctttacctttagattgaacataacctaaagatggtttgatacctaaatcagcaaagtcatactgtgcagttaactcgatattttgagttttgtttgcaattgcaccgtcaccatagtagttcatgttacgggtttcaccgtacattgctgctaagtaaacattgttagcttcgaatttaccaccaacgttccatgcttcagcacgtttaccagtagcatcactcttatgttcttgccagttagtacgagcagaacttgagtaaccaccacccagtgttacgccccagcctaagttataagctgtagagaaaccaaaaccgtcgccatttgcttcagcgttgtctttacgtttattgttggtgttttcgttatttttgccttgatattgcagagcaaagcttaaaccatcaacataaccgaacatatcggtgttacggtaagttaatacgccagtagtacggctagtcatataaacgtcagtttgcgccatggagtcaccaccccataaaggcagaacgtcagtccatgcgttggtgtcataaattacaccgtagttacgaccgtaatctaaagaaccgaagtcagcaaatttcagaccagcatatgctagacgagttttagctttgttctcgccttcagtagtgtttgttttaacttcgtattcaaaacgaccgaaaccagttaaatctttattgatttgagtttcgcctttgaaaccgatacgtgcacgagaagcgtcaccgctttcatgatcgcctttagtatcagcatcagcgaagtaatgacgaacgtcaactttaccgtagatatctactttgttgccgtctttgttgtacatttcagctgcgtttgctgcaccagcaaacattaaagctgggattaccactgcaagaatattgcgcttcatcattattattaccctcattggtgttattcagacacctttgccactgccagaaatagtttcttaatttttatggaactatttatgagagttaagtgtcgtctgtgtcgggtgacagtgttccattggtaaaaaattttatctaccccgaatttgctacaaaatcgaaaaaagtgtaacaaattgtaacaatgtatttcaaagtgtgtatttgggggaacttttccatcaaattgtagccatgcataaaaaaagccaaccctgaggttggcttctggtataactaaagttagtacaattaatcagcaacacaaatgttttttgttggctactaattaatcaaactattagaaatcgacatttcttggtgtacgtgggaatgggatcacttcacgaatatttgtgacaccagtcacataagcaactaagcgttcaaagccgagaccaaaaccagagtgtggtactgtgccataacggcgtaaatcacgataccaccagtagtcttctttattcatacccatctcagctaaacgtttatcaaacatctctaaacgttcttcacgttgagaaccaccaatgatttcaccgatacctggtgctaacacatccattgccgcaactgttttaccgtcttcattcatacgcatatagaatgctttgatatctttcgggtagttcttcacaaccacaggggctttaaagtgtttctcagcaagatagcgctcatgctcggaggagaggtcaacaccccaataaactgggttttcaaatttctggccgcaattttctaacacagtaatcgcatctgtgtagtcaatttgtgcgaaatcagaagcgataaagtgctctaaacgtgtaatggcttctttatcaacgcgttgagcaaaaaactccatatcatctctgcgctcagctaacacggcagaaaaggcatatttcagcattttttctgctaatccggcgatatcattcagatcagcaaaagccacttcaggttcaaccatccagaattcagccaagtgacgactagtatttgaattctcagcgcggaaagttgggccgaaagtatagactttacttaatgcagaggcataagtttcgccgtttaattgtcctgatacggttaagaaagcttcgcgaccaaaaaagtcttcgctaaaatcaacttcacctttatcagtacgtggcaggttgttcatatctaaggtagagacacggaacatttcacccgcaccttcggtatccgccgccgtaattaatggcgtagaaacccagaaaaagccttgctcatcgaagaaacgatgtagtgcttgtgccaaggtatggcgaacacgtgcaacagcaccaattaagtttgtgcgtggacgaagatgagcaacttcacgcagatactcaacgctgtgacgtttagcggccatcggataagtttccggatcatcaaccattcctactaccacaactttggtcgcatgaatttcaaagttctgaccttgacccggagattcaacaattttaccggtgacttccacagagcaacctgtggttaagtgcagcacttcatcttgataattcggtaaattattattaatgatggcctgtactggattaaagcaggaaccgtcatagacggtaaggaatgagataccagcttttgaatctcttcttgtacgtacccaaccgcgaacggtgacgtcttcgccaaccgcgatacggccttgcagtacgtcgactacaggcgcaacgatcataaataaatctctcttcgtttaattaaaataattgtttagtaaattcattctgcccctgtcggacagtttttctatgttacttgcaatagcgcaggaaacaagtaggaaatttcagtttaaagagggaatcagcaagagaaaagcctttatagaaaatattttgctaaaaataggtaaaatcagtcgaatagtgggggtgatagcaaaaagaaagggcaatattggccctttctttatagatagaatagatagagtgaataaatagcgatttaatctttattaacaagcttgcctaacaagaggaacatcaaaggctttacgtagcttgtcgacaaactcatcatcttcacaaatggttttacctggactatctgataatttagcaacaggtttaccattacactccaccagcttaatcacaatattaagaggtgtaatattcgggatattacaagtcaatctggtgccgataccaaaaattaagcggatacgcttatggaaatgcttataaagtactaaggctttctgaaagtcgaggctatcagagaataccaatactttactcatcggatcgataccgagcttttcataatgagcaatggctttttcaccccattcaatcggatcacctgagtcatgacgtaacccttgataacggctggcgaatggcatatcaaagtcacgcaggaatgcatccatagtgatacaatcagtgagtgcaataccgagttgatctgggtattcatctagccatgattgcaatgcagcccgttgactattggcaagctcaggactaatttgctgatgtgcttggaaccattcatgggcttgtgtgcctacgggggccagttgcatacgttcagcaaaatgatagttactagtgccgataagataagggaaatgattttttaattcatcgacaatggcacgttgcacatcataagaaaagcgacgacgagtaccaaaatccatcaatttgaaatccgctaaatcaatctgttgttcagccgcatcacgatagaaaatatcgataagtttgcgtaattgaataacggcgtcatcagcggtgatttgtggcgaacgagcacggtggacaatttcactcaccaatgctaacaaaggaacttcccataaaataacttcacgccaagggccagttatcttaatcgtcaattgattgtcagcagtggtcgcgatatgcacttgctcgggtttaaagcgaaaatgtttaaaccattgcagatagtcatttttaaagaaaggcaggctttgaagatagccaaactcttcattagttaatgacaagtctgccatcatatccacttgatggcgtaaggttgttgcatattcacctagacgttcatcactccggcagcggaattcagcaacgacaggaatatcactataatgatggtaaaccgcctgttgcatgtggagcttgtatgcatcggtatccaacagtgatgtaataatcggtgtagcgtctaaaatcatagcgcgtcaagcatcctcacggagcgtttttatgtcagctaaatcgttaaggttggagagtatacccgaatatgatgataatgcgtcactattcgttaatatttctctgcgacataaaaacaagctgtaaatctctattgagtttaccacgttaaacataatttgggagtatgttagcatcaattagcaaataaattagttacacatattaataccccattaacattctattgacttttaatgtgctcaattgaatattcgactagctaaaccgttttttgacgagtaagctttggttatataaccgtaaaatagtcgtgttaactaaaaggcttttttctatgacacaacaaagaattgctaaatatcgtaaagattaccgcgccccagattacaccatcactgatttgcatcttgattttatcttagataaagaaaaaacacaggttactgctattagccaatgcaagcgcttagcgacaacggtaacgccgttggtgttagatggggaagatttaacattaaaatctatttttgttaatgatgttgcttggacacactataaagaagaaaacggcaaactcatcattgaccaattgcctgaacagtttacgttaaaaattattaatgagattaacccatcagctaataccgcgttagaagggttatatgtttctggcgatgcgctatgtacacagtgtgaagcggaaggtttccgtcatattacttattatttagatagaccggatgttttagcgcgctataccaccacgatcactgcagataaaaaacagtatccttatctattatctaatggtaaccgtgttgcacaaggtgatcttgaagatggttgtcattgggtgacttgggaagatccgcatcctaaaccaagttatctctttgcattagtggcgggagactttgatgtattacgcgatacatttaacactaaaagtggtcgtgaagttgctttagagttatttgtcgataaaggtaatcttgatcgtgctgattgggcgatgacatcactaaaaaatgccatgaaatgggatgagtcacgctttaatttagaatacgatctcgatatctatatgatagtcgccgttgatttctttaatatgggagcaatggagaataaagggcttaatgtctttaactctaaatatgttcttgctaaaagcgaaacagcaacagacaaagattatttagggattgaatctgttattggccatgaatatttccataactggacaggtaaccgtattacttgccgtgactggttccaattaagcttaaaagagggactaacggttttccgtgatcaagaatttagctctgatttaggctctcgctcagttaatcgtatcaataacgtgcgtgttatgcgtacagcacagtttgccgaagatgcaagcccaatggctcatccaattcgtccagatagtgtgattgaaatgaataacttctataccttaacggtatatgaaaaaggggcggaagtgatccgtatgatccacacgctactcggtgaagagaaattccaagcgggtatgcagatgtatattcatcgtcacgatggtagtgctgcgacctgtgatgattttgtacaagcgatggaagatgcctctaatgttgacctgactttattccgtcgttggtatagccaatcaggtacaccggtattgactgtacgtgatagctatgacgcacaaaaacagcaatatacattaaccgtcagtcaaatgacgccaccaacggcagatcaggcggaaaaacaagttctacatattccgttagatattgaattatataatcaacaaggggaggttatccctttacgttcacaaggtcagccggtttctaatgtattaaatgtggtgagagaagagcagcagtttatttttgatgatgttgctcaacagccaattccttcattattgcgagaattctctgcgccagtaaaacttgattatccttttacggatgagcaactctcattcttaatgaaacatgcacgtaatgctttttctcgttgggatgcggcgcaatctttattaggtcgttatattaaagaaaacgtttcgcgtgttcaaaaagggcaaccattaattttacctgaaatggtaattgatgctttccgtgctgtattgcttgataaagatatcgatcctgccttggcggcacttattctgacattacctaccgatgttgaagcgggcgaagcttttgctattatcgatcctattgctattcatcaggccttaggttttattcgtaaaactttagccactgaaatggctgatgagttctctgcggtttatcactcaatgcatatcggtgcttaccgtgtcgatcatggtgatattgctaaacgtgatttacgcaatgtctgcttgggttatttagccgttgaaaaccagcaaacgggtaatcaattggttgaagcgcaatatcacaatagcgacaacatgaccgatgcactcgcggccttaaatgccgcagtaatggcacaattaccttgtaaagaggcactattacaagagtttgatgataaatggcatcaagatggcttggtaatggataagtggtttagcttacaagcaatgagtccggcaactgatgtattacaaacagtacgcagtttgctatcacatcgctcttttactttagctaacccaaatcgtactcgtgctttaatcggtgcgtttgtgaataataaccctgtggctttccatgcagaagatggctcaggttatttattattgacagaaattctgactgacttaaatagccgaaatccacaggttgcatctcgtcttattgagccgtttattcgtttgaaacgctatgatgctaatcgccaagagaaaatgcgtgccgagttattaaagctaaaagcccttgataacttatcaggtgatttatatgagaaaatcactaaagcattagcggattaacactatatcgctatcactaagtaagtgataagaaggtattaagttagcatgataattagatccccagcatattctggggattttttatggtaagtatttcatacaaaaaattataatggtttaataatatgtattgaataaaagctaaggggttatgactattattcaaataatttttggcgttctttttctaattgtaaaattaattctttttcgcttggtaattcaagcatatattttgaagcgaatagctgtttactttcatttagaatggagtatttggctactgtgtgatttttttcagtgcaaagaattagccctatggttggattatcatcatgacggcgttttttctcttcatacatgcggacatacatatccatttgcccaacatcttgatgggtgagtttatgcatttttaagtctattaacaaaaagcattttaagtgaaagttataaaaaactaaatcaatatagaaatcaccatcattagtactaatacgttgttgtcgttcgacaaaagcgaacccttttcctaattcgagtaagaattcttttaggttttctattaaagtttgttctagtttattttcttgcaggatactactaggtagtcctagaaaatcaaaaatatagggatcacgtaaataatctttgactgaagttgcgagttcagtagttttttgttttccttcagctaatacaggataaatactttgctgtttcccctgtgttgaaagtaatcgttcataatataatgtgctaatttgtctttctaatgcacgggcggaccaagattgtgtaattgcttcatctatataccattgacgggcgagttcattctttagttttagtagcgttctataatgagtccaacttaattcgtgacgcactgcgtcacgaattggaaatgtgagataaaatttcctcatatatcgaagatttgaggtatcaaatcctttaccaaattcttttgttaattcagctgataaagtttgtaaaactctttttccaaattttgctcgattatctccatgttgttcatcttcaacaattaaacgaccgatttcccaatatgtttgtaccattatgctgtttactgcttgtactgtgttttttctaccttgtatcaagaggtttcgaatattcgtaagtaaaggggtgtgcgtgttaatggtttttttatcgttcataaagtagtttccatttttgagtataaaagactcttttactcaatttactatccaagtttagcgctactgaattgctaggatttaactagtgttatattgctcaataattgtagaaaactttatttattgataaatatgaaaaaaatcttaaatattgatttttttaagttttttgagatgttacatcatcttaatgaaaggagaattgtgcgagggacatcataaactggggattttttatggtgaattgtgcaattgaaacgtttacttttcgtgcttttatctatatgatgctcgacgcttaaatcgtcgtagacatatcattcctaatacccgatattctcaatggagatcgtatgtattattccttagtaaggaaggcattgtttcggctagatcctgaacgtgcccatgattttacctttcgtcagttaaaacgcttatctcattccccatttcaatttcttattcaacaatcacttcctgccaaacccgtttcttgtatgggactttcatttaaaaatcctctcggtcttgccgccggccttgataaaaatggtgattgcattgatgcattaggggcaatggggtttggctttattgaagtgggtactgttacaccacgagcacaagtaggtaatgacaaaccgcgtctctttcgcttagtagaagctgaaggcttaattaatcgaatggggtttaataatttaggggttgataacctaatagagaatgtaaaacaatctcaatatggtggtgtgctgggtattaatatcggtaaaaataaagatacccccgtagagcaaggaaaagatgattacttaatctgtatggaaaaagtttacccttatgcaggttatattgcgattaacatctcttcacctaatacccccggcttacggacactccaatatggtgaagcattagacgatttattatctgcgattaaaaataaacaacttgagttacaagggaaatatcaaaaatatgtgcctgtggccgttaaaattgcccctgatcttactcatgaagaattaatccaagttgcagatagcttagtgcgtcaccatattgatggcgtaattgcgaccaatacaacattagacaaatcattagtgagtggattagatcactgcaatgaagccggtggattaagcggtcgtccggttcaatcaaaaagtacacaaatcattcgacaactaaatgaagagttaaaaggcgctttacctattattggggtaggggggattgattcattgactgccgcacgcgaaaaaatggatgcaggtgcttctttaatacaagtctattcaggattcatttatcatggtcctgcacttataaaatctataattaatcatatttaattacattcaataatcagttaagggcttttcttctgcccttaactcgtttatattgcctctagttgattattttttattaaatggcagtgattgtgcttaattaataaaaaaatgaaccctgtttttgttaggtggtattaaatattttatttaggttatttaatattgagtatcagagaaaaaagcaggtaataaatcgaagggggaataattagtgataataaaacccgatgatcgctggcgttggtattttgatgacgagcaacaaaagttgatgctcgatttagctaatggaatgatttttcgtagtcgttttccaagtaaaatgctaagtgcaactgctcatcaatcatcaccttttactgttgatgatgctgctctttattatggatatgatgagcaaatccgccagattgatatgccttctgagtcgcgagcagaattagcgttaaacgcattaatagcccatcgttttttaaagccattaatgcctaagagctggtattttgaagtgagtcattcatcaacccgcccttatttagctcaagtggtggaaaccgcattgaaagatagcaatgaaaaagtgctttttttagtggcggaagtgggagagcaagcctgtttatgcttattagcccagcctcagttagcattatttgatagaacactaacgttttgtgatccactaaaaatcatgaatgatcggttaagtgaatatcataaacagtctgagccaagatcgtttttgtacgaaaaagtcatctaataaaagagtaaaaaggacttactcttttattttcacttattgtttataatatgctaaaaacaattggccttaaacaacacttcctaaaatcaaatctgcattattctctttttgcaacaaatttataaaagtaaataaagtgagtttatagttaatttaaaattgggttattgatgagataattcttaatcagcagagcagatcatgcaaaataaaaagaagataaggacagtttaccttctttttatttgtgataaagataagcgttattttttattaagtgaaagttttacattgcctttaggaacacaactacatgcgagtattctgccagaacgttttatggcacctgcttttaatgcattgacatcaccttcatctaattgaataacacaagagccacaaatccccgcacgacaactatagggaatagcataaccgtgattttccagttgctctaacaacacctcttgattattcccatcaaagctgatgccattaaattcaatagtgacagcttgttttggctcttgagcggaggctgctgtaaccgcattgtcagttgctggttcggttgtttgctctgttgtttgtaaataagatttcgcttctttataagctaatatttcaactttatccccaacacgaataatacctgattggcgaatgataatattttgaccaaaatccacatcgcctttttcatctgtacggaatgtttgcagtgttgctaacggttctgtggtaggatgtttaatgcctttatcgatactgatagtggtcataatgcagcgactgcaaggcttgactaagtccatgacgacagagccaatacggattgtttgccagctatcttctgcaaaaggttttgcacctgtgatgatgatattaccgcgaaattgctcaatattgattgaagctgggcaacgctgttgcagagactgaaatgaggcttcattaatcaatagataagggtaaccgtcagcgaacgaaaccgcggtttcaggagatttttttactcgacgtgttgatttttcacccgtccagcgaagttgtacatccatgcctaaatagcggctgaaccattgatttatttcatctggggcaacataagcggtaaaatgatttccccacacttcagttggttgtaatgaagattgaaaatcctgataagtaatggcaattccttcaccatcgggtgcttgaatataaataccatttgtcattacagtgggaataaaacacagcaacaaagggtatttacgtgcggtgataaatgtcccctcaggggtcgttatcataaaatcacgatcaaacgtgaagccgctttcacgggcaaaggcttgagaaagacgagtccctttcattgattttacagggtgtatataaaggcgtgatacgttgatcatcagtgctcccaaaaaggttttattatttttttatcgtcagtaactttatgacaacgtaatacaattagctataatgcccaacaattttattttaggtggtaacaatattatgcgctctctgtttgccagcacaggccgaggtctggaagaattattaaaaactgaacttgaacaccttggtgcccagtcttgccagattacgcaaggtggtgtctatttccgtgctgatgataaaaccatgtatcagtctttgctctggagccgtttagcttctcgcatcatgcttccgctaaatgaatttaatgtctacagtgatctagatttataccttggtgtgcaagcaattgattggagcgaagtatttacagttaatcatacttttgctattcactttaatggcactaatgatgtgatccgtaatagccaatatggtgcattaaaagcgaaagatgctatcgtcgattcattccaacgtaaaatagggcaacgaccggatgttgctaagcaatcaccggatattcgtttaactatacatctacataaagaaaaagcgtcattatctttagatctcagtggcgatggattacatcaacgtggttatcgtgacttaacagggcaagcaccgctaaaagagaatctagcagcagcgattattatgcgttcaggttggaaaaccgatacaccattaattgatcctatgtgtggctcaggtactttacttattgaagcagcaatgatggcgacggattgtgctcccgctttaaatcgagtccattggggtttccgtcattggttaggacataatgaagcgctatggaaagaagtcactcatgaagcatttgcccgcttccgtgaaggtaaaaagaatactcaagcgcgtttttatggtttcgatgtggataaacgtgtattagatatggcaagagccaacgcacgtcgtgcggatgtggccgatttaattacttttacccaaggtgatgcagcaaaactgactaacccagtatccacgggtgttaaagggacgattattagtaacccgccttatggtgaacgtttagaaagtgaacccgcactcattgctttgcatagccagttaggacgtgcggtaaaagcccatttcccaggatggcgattatcactttttagtgcttctcctgaattgttaagctgtattcagttacgtgctgagcgtgaatttaaagctaaaaatggcccgttagattgtgtacaaaaaaactatttattatcagaaacaccttcgacgattaatacacgactggcggaagattttgctaaccgtttacgtaaaaatgagaaaaaactcgcaaaatgggcaaaacaacagcaaattgagtgttatcgcttatatgatgctgatttaccagaatataatgttgcggtagatcgctatggcgaaaaagtggtgatccaagagtatgcacctccaaaaaccattaatgaacataaagcacgccagcgtttatttgatgtgattagtgccaccatggaggttttggcattacgctctgatcaactaattttaaaaactcgtcaacgccaaaaaggtaaacaacaatatgaaaaaatggcagagaaaggggatttctttttagttgatgagtttggtgccaaattctgggtgaatttaaccgactatctcgatactggactgtttttagatcaccgcattgcacgcaaaatgttaggtgaaatgagcaaaggaaaagactttttaaatctctttgcttataccggtagcgcgtcagtccatgctgggttggggggagctaaaagtaccacaacagtagatatgtcacgaacttatcttgaatgggctgagaaaaactttcaagcaaatggattatcaggtagacaacatcgtttaatgcaggcggattgcttacagtggctaagccaaagtaatgaacagtttgatgtgatttttatcgatcctccgacgttctctaattcaaaacgcatggaaaatacctttgatgtacaacgtgatcatattgaattaatgaaacatctaaagcgtttgttaagaaaaggcggaacaattatgttctcaaataataaacgtggtttcaaaatggatcatgaagcattagcgaatattgggttaacagcaaaagagataacacaaaaaacgttatcgcaagattttgcacgtaaccgccaaatccacaattgctggctattaaatcatgctggtgaggaataatttacaatgccgttaattagtttgactggggcttatttagcgtttagtgatgcccctttattagataatacagacttgtttattgatgaaaatgaacgcgtttgtttagtcggtcgcaatggtgccggaaaatcgaccctattaagagtgttagccaaagagcagcccttagatgatgggcaagtggtgtatgaacaagatctggtgactgcacgtttacaacaagatccccccagagatatcgaaggcactatttttgattttgtcgcgcaaggcgttgcagaagatgcgcaatatattaccgaatatcatcgtgtttcaaaggtaatagaaacggacccttctgaaaaaaatcttaatcgattagctcagttacaagaagtgctcgataaccgtaatctctggttattagatagccgtattgctgaagtactggaaaaattagggttaaatggcgaagctgagctttcctcactttctggaggatggttaagaaaagccgcattagggcgcgcattagtgagcgcaccgaaagtgctctttttggatgagcccaccaaccatctagatatagaaactatcttatggttagagaaattcttaaaggatttccaaggtagcattgtctttatttcccatgaccgatcatttattcgtaatatggcaacccgcattattgatttagatcgcggaaaactatcctcatggccgggaaattacgataaatatctggaaagtaaagaagaggcattgcgtgttgaagagcaacaaaatgctgagtttgaccggaaattagcgcaagaagaagcatggatacgtcaagggatcaaagctcgccggactcgtaatgaaggtcgtgtacgggcattaaaagcattgcgagttgaacgaagtgaacgtcgtgaagtattaggcagtgctcgtatgcaggtcgaagaagcaacgcgctcaggtaaaattgtgtttgaattagaagatgttaattatagcatcggtacgcgtaggctcgttcgtgacttctctgcaaaagtgcaacgaggagataaaattgccttagttggccctaatggttgtggtaaaaccacactactcaaattgatgttaggggatttaaaagcagatagtggtcgtattcattgcggcactaaattagaagttgcttattttgatcaacaccgtgccacacttgatcctgataaaacagtgatggataaccttgcagaaggtaagcaagaggtgatggtaaatggtcgtcctcgtcatgttttaggttatttgcaagatttcttatttccaccaaaacgtgccatgacacctgttagagcactttcggggggcgaaagaaatcgtctattgcttgctcgtttgttcttaaaaccaagcaatttacttattcttgatgaaccaactaatgatcttgatgttgaaacattagaactattagaagagctggtggatgcttatcaaggcactgtgttgttggttagccatgatcgtgaatttgttgataatagtgttacggagtgttggatctttgaaggtgatggcgtaatcaatagctatgttggtggctattatgatgcgcagcagcagcgggcacagtctgtttctcttaaaaatgaagcgaataagtcacgtaatgcaccagaaaaaactgaaaaagagactaaaccaaaacagaacgccaaaaaggctacacgaagtaacaataagttaagctatcatttgatccgcgagcttgaacaactgcccgctaaactggaacgtttagaagaggaattaggttgtttacaagaagaagtggctgcagctgatttctttacacgtcctcatgaagagacagaaaaagtgctaaaagcattagctgataaggaaaatgaacttgaaacagcttttgatagatggcaagagttggagatgatgcaaaacggtgaataacgtatgccaactcataacggggcataatgccccgttttagtctctatacttattgttgtttattgattatcaaataaatgagaggtgccgttgtgtgttcgggtcaacattcttgtcatgaagaacaacatgagcaaatattgtgccctcagtgcgatctggtagtgagtgttcctgaattagcccaaggaaccaaggcgacctgtccacgttgtcacactttgctaacagcacgttggcgacaacctttttatcagcctgtagccttggcgattagtgcattatttatgttgttaatggcttgccaatttacttttgtcagtatggaagtggcaggaattaccaataacattactttaatgcagatcccaactgtgatgtttagcgaaaattatgttgagctaggcgctttctttttactctttgtacaagtggttcctgctttctgcatgatagcgattttactgctttgtacacccattaagctgccaagaaaattacaaatttggctatcacgaattcttttccaattaaaatcgtggtgtatggcagagatttttttagccggtattttagtcagttttgtcaagctaatggcgtatggtgatatcggcttagggttaagctttctaccttatgtactttactgcttattacaaattcgtgcatttcaatgtttagatcgtcatacattatgggaaaaactagaatcgcgacccgcttatcctaaaattgaatcaggtaaaacaggtttaaagcaaggggtaagattatgtcgttcttgcactgctattttaccggctgatcaatatgaatgtagtcgttgtgaagtaaaagggtatgcgagaaaacctcatagtttgcaatggacgctctctttcttaattacttctttaattctttatattccggctaacctattgccgattatggtgacggaatcgctgggtaataatctttactcaaccataatggctggggttatcttactttgggaagatggttcatatcctgtggcaatggttatttttattgccagtattatggtacccagtttaaaaatggtagctatcggttggctatgttgggatgcacataaagccaaaggaaaacgtgatccggcgagaatgcactttctctatgaagtggttgaatatgtagggcgttggtcaatgattgacgtttttgttatcgctgttttagcttcattagtcagaatgggacgtctgatgagtatctatcccgattttggtgtagtgctatttgcattggttgtcgtattaacgatgttctctgcaatgatgtttgatcctcggttaacatgggataaatgtactgccgatgatgataaacccatgattaaggagcctaagggtgactgaaaagaacgatactgctttaacacaagcaaaaattaataaactgaaaagctggtctccagtttggataatacctcttgttacgttattgataggagcttggatactttattatcatttcagtcatcaaggtcctgaagtcacattaataacctataatgctgatggtattgaagcaggtaaaactaaaataaagagccgcagtgttgatattggcttagtcgaaagtgtgacattagatagtaattttagtcgagtgatcatcaaagcacgtctcgataatgaaatgaaagagctactgcgtgctgataccgctttttgggtggttaaaccacaagtgggaaaagaaggtgtcactggtttaggtactctactctcaggtgcttatattgagctacaacccggtttaacaggtaaagagcaggatgaatttaatttattggactctccgccactggcctctccggatgcaaaggggatacgcattaatttagtcagtgaaagagcaggccagcttaatgcaggtgatccggtattatttaggggttatcaagtcggctcggttgagacgagtgaatttaatattgaaagccgagatatgcactaccagctttttatcaaagcaccttatgacaaaatggtcacgtcgaatgttcgtttctggaaagattcaggcattgcatttgatatgtcatcatcaggggttcgtgttgaaatggcttcgctttccacactgtttagcggtggggtgagtttcgatgtgcctacggggtggttacctggtgaagctattgcccctaaaacagaatttaaactttatgataacgaaaagagtattcaaaattcgttatataccgattaccgtagctatattatgtttttctctgattctataagaggattacaagccggagcgccagttgagttccgtggtattagaatgggtacggttgttcaagtaccctattacacccaagaaatgcaacaatcgttagataaagatttccgtattcctgtgcttatccatgttgagccggaacgttttgcgaatgatgtcggtgaaagttttgatttcgtaaaagagctttcttctgctgctaaaaatggattaagagcatcgttaaaatcaggcaatctattaacaggtgcgctgtatattgatctggacttttatcaagatgttgaaccttggaaagggccacaaactgttgcaggattaccacaaatacccacagtcagttctggtttaacgcaaattcagcaaaaagtgatgacttcattggataagatcaacaatcttcctgttgagccaatgttgaaagagatgactgcgacattaaccgaaagtcaaaaagcggttgctgaagcgaaggaaactctgaaatcattaaatgctatgattggtagtgatgacttccaaaaactgcctaatgatattcaacagtcattaaaagagatcaatcgcagtatgcaaggtttccaacctggctcaccggcatacagtaaaatggttgataatatgcaacgcttagatcaagtgctcagagagatgcaaccgctattgaagaccttaaacaataagagcaacgcattaatttttgaagcacaacaaggtaaagatcctgaaccaaagagggctgaaaaataatgaaatatattattgggatcgcggtattgatgctgacggcttgttcaagtgtgcctgataaagcttattatcaattacctgatgtttatcaaggtgcaaataataaggttgttacaactactgagagcgcaaagcaagatcagatttgggttcagcctatccgtttatctgatatgttagttaacacgggcattgtctatcaaaccagtgatatcaattataccgttgctaaccaacatttgtggataaacccgcttgatcaacagctacagcaaaatctggttgtgggattagcaaaagaattccctaatcgagtggtttcgacacaacctattgaagataaacttgctaaattgactgtcaatgttaattattttcaaggtcgatatgacggcaaagtgattattgctggtgattggatctacactcaaggcaataaagtgattagtcagcctttttctgtcgcgttaacacaaacggaagatggctatccggctctggtacgtacgctaggggaaggatggcagaatgtcgtcgctgagatcgcaaaaacaattaaatcacaatattaattgttttatacagtaatataagaataaccaatgcctgactaaaatcaggtgttggttttttattcgagataacgagagaaaaatctcatgctggaattgataaaaaagaaataccctacagcgatttgttggtctttcggggataatccgcagcttgctgatgaacttgcacaacttgtcgttgaaagaaaaaaacagcaacatgtagctcattaagtggtttttttagtgatccagtcacgccaacaattggtggttacaatattattttaaatagccatggggttcctatttgtgttatcagaacacgctctttaacattggtacgtttttctgaggtcacagaacagttagcgcgtaaagaaggtgagggtgatctaagcttgtcatattggcaacaaggacataaagaattctttatgcgagaaggtacctactctccagatatggaattaatatttgaagaatttgagttaatagaggttttttagttaacaggcttcatatttgtcgataacttaagttatatcattaatgttgctatggttatttggcataaattttatttttactactgtgaatagtagaaaataggcaattctaataggattgttatattgacataaattgaaaaaaatcgattatttatttacaagctattgtttttattatttaggtcagaaatcggatctttaatattatttttttataaaaataaataaaaatcagcttgttatgatttgctttatgtcttttattaataaatacaaatagatataaattatttaattatattaaatataattaattgtaatctaaggtgatttaaataggatccagcttagtatcacaaatatgacaattatattaatttctttacttgcttaaatcctcaataaagcgtatcaatttatagtggttgtatgaaaaacaatcattatctttccgcttaaacttagaacgtgagggttgtctaaatatgaaaagacagaaacgagatcgtttagctagagcattatcgaaaggttaccaagccggtatgcaaggtcgttcaaaagagcagtgtccctattttgccattgatgcacgttcacattggctaggaggttggcgacaggccatggaagatcgtcctgggcttgcaaaataaataacccgtcgaggtgatactgcggacacctgtgttatcgcaaatattatcaccaagatttaattgataatcaaaagagggttatttatgcatattcctatgaataacttgaacataggacaatttgaatataaataacaactgtgaattggaaataaaaaggtctaccgcggtaggcctttttatgttgtaaagtacggtagggcgaaaacttgccaagtactcttatctgagataccaccataccaccataaaagaaaaagcctaatctcatcgaagagaataggctcttatctatctatgtgtaatattgacttaaaatgctgaggtatctttaaataagccgacttttaaatctttggcttcataaatcagtttaccatcaacataaacttcaccgtcagcgatacccataataagcttgcgattgataacacgtttgaaatcaattttataggtgacttttttggctgttggtagaatttgcccagtgaatttcacttcacccacacccaaagctcggcctttaccttcaccgcctaaccaacctaggtagaaacctaccagttgccacattgcatcaagccctaaacaacccggcataacaggatcattgacaaagtggcaatcaaaaaaccataagtctggcttgatatcgaattctgcttcgataaagcctttattatgggagccgccatcttcagtcattttaatgatgcgatccatcattagcatattacctgaaggcagtggtgggccatcttggccaaataattcaccacggcctgaagcaatgaggtcttctttagaataagattcgcgtttatcaaccattgtttatatagcctttatcaagtgtaaggtaacagaatagcttacacttgtacgctgaacaactccgatcacttgaaacagaattatctgaataagcgcaggaaccaaggtaatttaggcctatcctgattattcgcttgtgttattcgatcatgaataatagctaacaagtgttcatttgattgtggattttcacattgttcttcgtaataaggctgatgtgttagcaaagtaattgcttctgcaacatggacaaccggccaaatatggaacttattttctttgacagcttgtatcacgctatcgtttaaaacaagatgtcgcacgttcgccagcggtataataaccccttgtgatcctgttaatcctctttgctgacagatatcaaaaaagccttcaattttttgattaacaccaccaataggttgtacctgaccaaattgatctacggcaccggttacggcgatttgttgatcaatagggtgttgtgacaatgtactgattagcgcacataattctgctagtgaggcactatcaccatctacttcaccgtaagattgttcaaaaacgacggaagcactaaaaggttgtggctgatctaatcgtaattcagaatttaagtaggcttgcataatcatcatgccttttgcatggatattgccacctaattctgcttttcgttcaatatcgaccagttcgccatcaccaatatgagccacacaggtaatacgagttggctcgccaattagatcgggataaccgggataatctaagacagaaagaccgtttatttggcctaccatttcaccttcagtgtgaatagtgacttggccttgtaatatttcatcacggcttcgttctaataagtagctatgtcgccataaacgattttcttgcgcttttttaagcgcctcagcaccaagataagcgtcatgattaaaacgcatggcataacgcaattggcgtaatatgaattcaagatcgagagataagataagctgatcttcatgctctcttgcgccctgagtcagtaatacttgccaagcatcagcagataatgaaggaagacgatatttttggcaaagtccattaacaaaaccacaccattggctcagggcggtttcatcttctaaatacatatcgtattcatattcgccatatagcgccgtactgctgatattaggctccataaactcaagctcttctaagcttaggcgatcgcccactaaaataacacgcaagtgaaggggcatggcttcaataggcaaaggaagtgcttgatggtcattccacactaaccattcaaagcgttgctcttcaaccatctttttcagtcggaaccacattaaaggttgtgctaagagcgttttaatggataagactaaaataccaccattgactttatgcagcagtcctgggttaacgaggagcttatctttatgataataaaatgaaccaaaaagttgttcaggctctatccattggcaacaagcaatagattctgatgatgaaaatgaaccttctacattatcttgccaataaatttgattagactcagcttgataggcacctacaacaggataagtttttatctctgcttgttgtaatgtatcagcgagtgtttcgaaataagcagtagaatcttctgcttttagcagcataaattggcctgcttctgcattatttagccactgtaagctttcatataagcgaggttgaacctcacgaagtgaagatgcaggcaattgcgatgctgtttgaaagaaagtttggtaggaggcgtaatctgggcgtaacgcctgccattctaattcgttgtttttcaaggttaccgtttttattattgagtagtgaacatggaagttaacataaagcgttaatagctggtatctatcctgcaataagacagctattgacagttatattatgtctatacttttggccgggaatatacgttgccattacttttgctataacctattaaattgaatgtattgttttattatagcgacgcacgattctatcacaacgtggttagaaaactatcccttctgacatttgtcggtggtaggtaacaaaaactacttatcttttttggtgataatttaagcaaaaatattcggtttaaggcagttttttggcaaaattgttgatatgctagtatgtagttacgttgtcacggtgatttgtatgaaatatcaacagttagaaaatctagaatgtggctggaagtgggcttatttggtaaaaaaacatcgcgaaggtgaattaatcacccgttatgttgaaaagagcgctgccgatgaagtggttgagcaactattacgccttgaatctcaaccattaaaagtccttgaatggatcaacttacatatgaaccctgagttatcgaatagaatgaagcaaactattcgtgctcgaagaaagcgttattttaatgctgaacatcagcatacgcgtaaaaaatctatcgatttaacttttaaggtttggcaacgcctatcagcactatctcagcgccgaggtttgacattatcagaaacgattgtccagcttatcgaagatgcggagcgaaaagagcagtatgcactaaaagtacataacctaaaagatggcctaattgagttactagaacgagacaaacagaaaaaagagtagatgacaatagcgttgtttattatcgagagatcatcagtatagcgttaacttaagaggtatagagaatatctctgctaatcatttaaagtcatcatcaaaagaaaaaccctgccgaagcagggtttttttagaattcattacagtagatttctctactatttgaattattgaccaggttgaacaacaacttcagttgtaccttggatttcgatttctacacgacggtctggcgctaagcaatcgatcagagctgcacgagctttgatgttgtcacaagtgttgccagttactgggttttctttaccacgaccttctgcagagatgctgtttgcaggaatacctttagatactaggtaatcaactacagattgagcacgtttttctgacagaggcaggttgtagttttgagaaccgatacggtcagtgtaaccgataactacgacacgaccttgagttgggtcgatgttagctaattcgttgtacagaccattcagtgcttcttgaccttcagctttcagagaagatttgttgtagttgaacagaacgtctgaacgcagagtaaaggttttgttctcaacaactggagctggagcaactactggagctggctcaacaactggagctggagtttcttggttgaaacggtaagcaacaccaacactcagcataccattgtctggacgagcgttcagagtacctttatcaccgatgttgttgatccactgatactcaagacgagtagcaatgttaggagtgatcgcgtattcagtacctaatgcgaatactggagaaacgccagtatcattttcagagaaacgtttttgagttcctgctgaagttgcattaatagttgcagttgaatctgcacgccataccataccacctaaacgtgtataaacgtctaagtcatccattactggatagcttaatttagtggttaattggataccttgagctttgaatgcaccgttgttgtatgaacctttataagccatacgacctaaccagtcataacccagttcaaaacctaagtattggttgtactgataaccagcaaatgcaccagcaccaatttggtctttgtgtgtgctaccgttaccgatattcacgccgtcccaattgttaccagtactttgatactgagaccaacctaatttaccaccggtataccaagtattgtcttttggagctgcttgcgctgcagttgcgaaagctgccactgccactgctaatgcgatagctgtctttttcattttacgcctcgttatcatccaagttaggcatttggctttaagccttattatttgcccttggttaaattattgttaggaattcgatgctttcatcaaatgatgatccccaaaaacgggatttaaagcataaccttaacgatataaagtctacaatgaacttaaaaagttacaagtatccctttaaaattcgacttaaaattttaaaaagatcggccgttattcacaataagaattattctatatttttgttaaatttcttgtaaccatatgatttaagttacaattgattatgacttatcttaaatgataatgttgcgttatgagtattaggaaaactcttaaatttcactaatggtagtgatttgaatgaatttttatcgagtttaaatgtcgtttagaggaattattgttttctatttggatatgattactgttttgttgtcgcatgataaaacctaacgctttaccgatgctggcagcatattctaatcttttcatctcttctgacgatatttctggtaaccaacctaatactacactgtagtttccacttagtagcgctttctccattaattccacagtattaattgaatcaacatgattgagttgaatgattttattcaggggtaagccggtttcttttaaccaactacgatttaatttttgttgtggacttaaccacagtaaccaacgtgattcatggctatactgttttaacagaggtagtaagatgtggttaatcatcaagggattttggtaaagcagttcacttaccatgccttgtctattatcgggcattgttgttgtaattgcatcggaggccatagagagaggtaatacctcagtagagatctcttggaaaaggccattttgtcttgccaaagatgatgttgagagtttcatatttacctcgttcaatatgtactgtatgtatatacagtatacctgagtttcacttaaatcaagatcaattttttgaaagttgctctcaaaatttatgtaaattcatatttttgagcgggtaactattggcaaaaaaaggacatttatttattgtcttaaccatcaagaatacagtcatatatttgaattttaagataaaaaatattttttgtggtttggagatctgatgtcaattttacctgagcaaaggaaggctcatttattatcgcgcgtagcggaatatggaaagttaagtaagaagtctcaattcggcggttatagcttaatggttgatgaggttatctttgcgattactgctgataatgaattttatttaaaagggagtggttttgttgaaacactctataaagcaaacaacatggatgcatacgtctatctaaaaaaaggtatccccattacattgcgctattatcgtattacgcaagcaatatggcataatagcgctaagctcaatcaatatatcgattttgcatatcactatagtactcaggagtttttagggcagcaaaagcagcctcgtcgtatcaaagatttacccaatttgggcatagcattagagaaaaagctgaatcaagttgggattaaccgtatcgaggaattacgtacgatcggtgcgaaggcatgttatttaaaactgattgcgcaacctaagcaaggaaatagcgacttattgcttgcgttagcaggtgctattgttggctgtcatcggtctgtgttacctaatcaattaaaaatggaattgttaaattggtataaagagttatccgttaaatcctattaaactacagtactcggacttgagtacattagaatgaacaggaataacggaataagagcaaacttaagccaatagagtctgttattttctctaaggttctaatagaaattagagaaaataactttttatccatcaagctgtagctaatttatctttatcgttttgccattctgtttgctcaattagctcaatgcaattgacaatttgtggcaataaatccagtaacaagcgtatttgcgttaacactaattgaatacgggcgttatctgaacttggttgtgcattaacacgtgcgataagttgatcgtgagattgtataaaatcattatcttgtggttttttacgtctcaacgctgaatcaatataacagacagtatcattaagcagggtgagtaccgcttcatcttcaattttgcaacgatgaacacctaacgctgaaatatagctcagtaaagtatgatttaaacacagtaatttaaatgcttcttcttgagaggtttgaaagcttttaggctctgatgacatattagaaattaaagatgctaactcaccatcactgctatgtgcattacggcgtgcaatacgataattaacgctattatctcttccttgataatactgaatgaggatcgcatcaagatagtagcagttattggtcatggttttttggatgagcaatggcaactgacggaacttccaatccggccaaataaaactgactgcgaaccaggcaatggcacatccaattaacgtatcaatgatccgcggtagtgcgacatcatagccttcacctaataaattaaaactcaataaaacgagtagggtaataaacaaagtggcatgagcgtattgtacggttcggaaagcaaaaaagagcgtacctgtcacaacaataagcactaattgaccttcgatggaaggcacaaaatagagaatagggaaaccaattaaaataccaataatagtgccactgacccgtaatgttaatcgtctacgtgtcgcattatagttaggctgacagacaaacaaactggttaataaaatccagtatcctcgatgcaaatcaaaaaactggatgatcacataacctatacataagacaagtgacattcgtaccgcatgtctaaatagggctgattttggtgttaagtgaccctttattcttagcacgatatctcgccacccagtaagcccttcatcagataactgagtttcttctttttggtcatgagagatttgatattgctctgtactaatactttttaataaagcatcgatgccctgtaagttttgtaataaattatagagtggcgcaataatttgtggatcagaagtactgttttttacattattaagtgcattttctaaatgagtgattgcacgttcaaaatgaggattatgttggtactttttatgccaaagaatagattgagcgacttgttcgcaggctcttgcttgcattgacagtaagcgctgaaagcggaaaaggacatcactgtggcgtaatctatcactcagtaattgatattgaatatgagaagagctggcccgttcatgaatatcttgagccacaaagtaataatgcaatgtgaaacgactgctacgctggcccctatcaccttttaaacggcttagtaatgttagtttagtttggctcattgcctcaattaactgattattagccaatgccaagttatacagtaattgctgttgatcaccttcaatatcgggatcaaataatgcggccttggcttctagataagcggaaagctgctgataataacgcgtaaggctatcttgaacgggacgaatagggaaaagtaggtgaccaattaaggtaagcaaattataccaaattgcgcctaaaaggagccaaataggttgttcatgccattctgggaaaatcggcatacctaacatggtataaatagcgattaatagcgcaccaaaggcgatggtagcataacgctgacccaaggcgcctaataaaataaacccccaagtggagatagcaagaccacaaaagaataaaatagggtaagggtagagtaatccgatagatgttgatgctaataagaaacaacataaggtgatcacaaggtttcttaagcggcccacaagcctatcatctaagtcagttaatgcggctgcgacaacacctaatgtaagaggtatagtatattttggttcttgtcctaaagcccatggaaataaagtcgttcccgtaagtgcgattattatgcgaatataatataaaaagtggctattatagataaatcggcgggcgccattaaacaaattgaacacaaaaagcccttaaataaacaagatggagataattacctcttagaatatagggtttattacagataaaaaagagtttaacgacagactatttgttatttattgtaggaattacagaatggaactgaaatcaaccccaatgggacaacgtttagctcagcatccttataacagggtaaaattgttaaatgcgggtattgaggtcagtggtgaaaagcatcaatatttaattccttttaatgaattgatcgacattttttgtaaaaaaggcattgtgtggggagagttagagtttttactgcccgacaataaagtggttcgtttgcatggaacggactgggaagaaacgcaacaattttaccgctatctttatcaaacttggcaaatatggagccaagagatgagtgagataacggcgcaagtacttgaaaagcaactctcttctatccaagatataattcaaagcgataaatggataaagcaaaaccagttagccgctattcaacaggcaatccaagaaagtttttctgctcttcctcttcctctggaacgacttgctcaatttgataactgtaaggtgcattatcaacgctgtttacagtggttacagcaaggtaaggcattaattgcgcaagaaaatgagcaatggatcacccgtatattgacagagcatgcggagttttttactaccattgaaacatcgcctttaaatgaatcgcaatgtaaagccgttatcaacggtgaagataatatattggtattagcgggtgctggtagtggtaaaacgtcggtactagtggcaagagcagggtggttgttacgtcgtaaactagcaacctctgaacaaattctactattggcttttggacgtaaagccgctgaagagatgaaccaacgtttatctgagcgcttaaacgctgatattacggcgaaaacctttcatgcattggcattatttattatccaacagtcaactaaaaaacaacccaagatcagcgaattagaaatcaatagtgaaaagagaagaacactattgttaacgcagtggcgtgagcagtgtcagcagaaaaaagcacaagcgaaaggctggcgtgagtggttatctgaagagctagcatgggaaatccctgatggggagttttggcatgataaaaaattagaaaatcaagttgccgtaagattagagcggtggatcagtttattaagaatgcaaggtggtagccaaaaaacaatgattgattctgtgcctgcagaatatacggatgcatttaaaaagtatttaaaactattagcaccactgttaaaggcatggaaaaccgcattaaaagaagagaatgccattgatttttcagggctattacatcaagccattaatctgatagaaaaagggcgtttcgtcagtccttggaaacatattctggtggatgaattccaagatatttcaccactaagagcagcactattaaatgcgttaaaacaacaaaatacacaaacttcattatttgcagttggtgatgactggcaagctatttatcgctttagtggggctgaattattactaacaacagcgtttcatcaatcttttggtgatggtgctgagtgtgcattagataccacttatcgttttaattcgactataggtgacgttgccaatacatttattcaacaaaatcctaatcaattagctaagcctttaaatagcttaacaaaaggtaataaaaaagccgttgtattattgccggatgatcaattagaaagtttattaaataaaatgagtggttatgtcagtgacgatgaaacgatccttttattagcgcgttatcattacttacaacctgatttattgaaaaaggcgaaaacgcgctggcccaaattaaaattacagtttatgacttttcatgcttcaaaaggtcaacaagctgattatgtgattatattaggtttacaatcgggtaaagacggatttccagctccggcaagagagtcgattatagaaaccgctttattaccccctgttgaagactatcctgatgctgaagagcgccgattaatgtatgtggcattaacaagagcaaaaaaacaagtatggttattatttaataaacaacaaccatcttgttttgtgtcagagttaaaatctcaaggtgtccctacgcaaaaaaaaccataaggcattattttaaacgttcttttaaataaccttcatagtcgggaattttaatttttgactcttgtgaaaaaagaggggacgaaataagaaaattagccgtcgcacgattggttgctacgggaatattccaaactgttgctaggcgtaacagcgctttcacatctggatcatgaggaacggcattgagtggatcccaaaagaaaataagaatatcaattttcttttctgcaatcattgcaccaatttgttgatcaccgcccatggggccacttaacatctgagtgacctctaatcctgtatggtgattaaccagatttcctgttgttcctgtggcaaataacttatggtgagaaagctgttcactgttgtttttaacccattcaagcaatgagcttttacagtgatcatgtgcaactaacgcaatatttttttctgtggcgagtgtgcggtcaatttgttccatttgctacctttaaaaataaatacagttattattccagttgtcaacataccttttttttatcttacaagctatgagcggaacaagatactatgatgtatcataagattttcaatcttcctgctgataacggagcatataaatggttgattcagagatttatgacattctaagaagtgtcaaaacaattgcactggttggtgcaagtcataaagaagatcgccctagttataaagtcatgaaattcttattagagcaaggctatgaggtgatccccgttaatccgggtatggcaggggaaacaatattaggccagcaatgttatggtcatttgcaagatattcctgtggcgattgatatggtagatgtatttcgtcaatcatcagtagcgctcgagattgccaaagaagcgattaaaattaatgctaaagttttatggttacagataggtgtgatcaatgaagaagcaaaagcattagctgaacaatcggggttgcgggtggttatggatcgctgtcctaaaaaagagatagaagcccacggattgccttggtaataggcagagtaaaatcgccgaaatgtattcggcgattatcattaaggttaagaatggaagaaaattagtttcttaatcgcggggcctgtaattggttgcggattgattgtgacaactcatccattgagtcattatctaaatgctcatctgagagttcataagttatttgagcttcagctaaataggtatgaaccggttgtccttcatcatcttccatgacaacatgataccaaggcgctgatcgcaaggtcatattagatgcaatatcatcctcgttaggttgatcaagggaatattcagcatccacatcaacaactacacctaaataaccgagtagtttatgtctaacctgctggcctattccaaatttgctggcgatcatcatttatcacctccgtaaaaccttgctttattaatttctgtatatgagggcataaagtgaaatttcaaggtgtaacaaaattaaacacgtcgttatccagtgtaaatgcaaacctcacaaaatcagattatctattgtataaagaaaagacaacaatcttatcggaatttttgcgtcacatgtaagtttggagggtaggtaaatgaaggttggtagagaatatattattcaaggtcgtgtacaaggtgtcggtttccgctttcatacttatcaatggatgaaaaagcagcctattacgggttatgtgtggaatcgtgatgatggcagtgtggggatcaaagcttttgctgaagagcaggtactgagaaaaatagaagattggttggctgctggaggaccaatagggagtaagattgtattttggtcggcaacaccatgccaatatgaagaaatggcagacttttcaatccgccattatgcatcttagtattaaatacatttgacaggtttaggtaagcccgcgagcttcgttgcctgtttagcaggacctttagggaataagcgatatagataacggctattgcctttttcatcgccatatttttgtgctaatgctttcactaacattcggatcgccggtgaggtattaaattctaaataaaactggcgcacaaaacggataatttcccaatgttgctctgtgagttcaatttcttcaagttcagctaatattggcaccatctcttcggtccattcattgctgttttttaaataaccgtgactatctgtctcgatttgttgtccgttaaatacaaacatgtgtttctaaccaatcaaaaataatcatttaatttagcaaaaataaccgcaatacccaagtctaatgcgtaaatcgttgataaattaagctgttaaatcaaagggcgtttaaaattacgccaaacaagacaataagggctttacaatataagcgtggatgtttatattgctccccattgcggaggggtggccgagtggctgaaggcagcggtcttgaaaaccgccgatgggaaaccatccgagagttcgaatctctcctcctccgccatctcaatgtctcctaacatctcctagcgtatccttaacttcctttgatccactaaaaaatttcctagttaatagttttattcataattattcaaatttctgtttgtataaagagtattgagcattattgtaacctctaaatatttcgaatagattatggttgaatatatttacgactggggacaatcaatatgatgatttattgttatgatgacaaaataagtgaaattaaaatagaacaactcaccaaattgttatatagatgtgtccttggtggggcaagtgttgggtatactgacgcagaaactcaagtagatgatatgagaaattattggcttagtgttaatcactcattatcaacaaatacgtttaaattaattactgcagtgattgacggacaaatagtcggtgttgttggtcttgaattatgcactaaaccaaacggcacacatcgtggggagatttgcaaactattagtatcccctgatcataggcataaaggaatagcacagcaattgatgcaaaaggctgaacaaatagcatgggagagagggataacacttttaactttagataccattacaaaaggtatgacggtgagtctatatcgctttcttggttggcaagttagtggtgaaattcctgagtttgctcaagcagttgatggtaagtttgaggctacaaccattatgtttaaacttaagcctgagagtaatagttaaataaaaataagttaatatcattttgctatatatgatatttttctaaatacaccaaaataagccccagtcctagagcttatttttaaattaacgattaaaaaatttaattattaacaatcgttaatgtactaaatgatgaataagatattgtattcatcatttagtagcttattaactctatttccattatagagtgtgatagtgactgctttaatttgttgattaatttttaatttaccaaccacaaacattggcttcttcatccatatcataaccacggacgatattgattaaatctttaaccattagactcgccatatcaggatcaagtaaatcttttatctcgcattctttatccactgaaacaccattatttttattggtgagcgttaaagtcagcgcttgggctgagagatctattttgccctttaattcgttagttaataacaaaatttctttagcggcaacatcaggaatataaagtatcttaggattaaggaagattttctctactttatcattactgttatcacaaataagtgtcaataaataacctttattatcatttttcatagtcatttttaaccttcagcaagtattttggggtcaacataaaagtcgatattaaacacggtgtcttcagtttgtgcttcaattctgtgccaagtttctggtggaaatacaccaaactcaccctccttaatcactaaggtttcggtaggttttgggctatattgatcggcataggcataataaataatagtgccttgcatcacggataatctagggtataccccttgctgagtgcctttgtctaaatgtctctcccagattgatttaggggctgtctcccttgtccaaaaaggcgttgttcgtatatgaatatagtttgtgggaataatgatacgtttcattgcttctcccttattattgccagttattttgttgctttttatcttagtgaaaataaaaaacagagataaatcacctgataaattatttcttctttgaccaaaatttaccgccaataaagaagtatttcaaatgcaatttaatgatacttagatgatagttattcgatttagctctaactatttgtttttatttacttaaaaatattttaataaataaaaatttttttaagtttagctttctaataagcttaaatagggatttatgaaacttatttgggttaacaaaaaagcgttctctgtcctataatctatagatgtagggtatttaatgtttaacataatcgagatatcactatggaattaaaggattattacgccattatgggggtaaaacccactgatgacatgaaaacaattaaaactgcttatcgccgtttagcgaaaaaatatcacccagatgtaagtaaagagccagatgctgaggagcgttttaaagaaatagcgcaagcttgggaaattcttggtgatgaacagcgtagagctgaatatgacgaactttgggctcaccgcaatgatccgaaatttaaacaatttacacagcacaacaattcacattcaaaccaacaaagttttagtcaggaagattttgacgatctttatgcttctttctttggtcaaggttcaccttttgaagggcgccattcacgtcaagcacctagacaacgtggacaagatctagaaattgaattaccggtttttcttgaagaagcacaagaagagcataagcgtaccattagctatcatttaccggtttataatgtctttggcatgatagagaaagaaattcctaagaccttgaatgtcaaaattcctgccggtgttgttgatggacaacgtattcgtttaaaaggccaaggtactgctggggagaatggcggagaaaatggtgatttatggctaactatccgtattgcacctcatccattatttgatgtaaaagggcatgatcttgaaattgtggttcctattgcaccttgggaagccgcattaggtactaaaattgctattcctacacttaaagataaaattttacttactattcctcccgctagtcaggcaggtcaacgcctgagaattaaaggaaaaggcttagtaagcaagcaaaaaagtggtgatctctatgccattttgaaagtcgtcatgccacctaaagtggatgaaaaaacacattcattatggcaacaactcgccgaagcccaagccgattataatccacgtaaaaactgggagaataaataatggcacaattaacaacaatatttactatgactgagctttgtcatcatactggtgtttccaaagaggaacttcaagaaattgttgaattaggggttattgagcctgtagaaatcaccacccaggagtggtttttcaatgatgatgcagttgttgttgtacatcgggcgttaaaacttcatcgagagttagcattggattggcatggtattgcaatcgccttgacattgttggatgaaaatgaacgattaaagcaagataataaacaacttcgacaacagcttatgcgctttattaataatgaataaagtgtcagataatatatcgctaattgcttgagaaaaactaactataaaaatatagaaataattttttaaagcaattagcgtatatattatataataagagtgattcgttattaggttattattcactcgtttctaaggtcaataatgaaagccacctcagaagaagtccaagtttttattgcagtggttgaaagtggtagttttacacgtgctgcagaaaaattagcattagccaattctgctgttagtcgtacagtaaaaaaacttgagtcaaagctaggcgttaatttattaaatcggactacgcgacaattgagtttaacggaagagggggagcattactttcatcgtatgcaagttatcttgcaagatatgaaattagctgaagatgaattaattaatacacaaaaaacaccacagggtctattacgtattgatgccgcaacgccggttgttttgcatctactggtgccttttattaaacaatttcagcaaaaatatcctcaaatcaccctctctttagtttcatctgaaacatttatcaatcttattgaacgtaaagtagatatcgcgattagagtcggtaatttaacggattccagtttacgggcaaaaccactattgaatagttatcggaaaatcgttgcgaccccggactatctcgcccgttatggacagcctaaaatcgcagaagatctgcttgaccatacttgtctaacttttactgaaccagtatcactaaacacatggcctattgagcgagagaatggacaattattagaagctcctatgggaatatcgtcgaatagtggagaaacgataagacaattgtgtctcgaaggtaatggtattgcttgcctttccgattttatggtggttaatgatatcgaaaatggtcgatttatcgaattattccccgataagctgcgacctatagctatgccttttaatgccgtttattatagtgaaaaagtggttagccaacgcatccgtgtatttattgattctctgagtgagtatattgctaaaaaagtaggttaaaacatataggtgataaaaataatatcacctatattacgatttaaattggttaatcttaatcccaatgaggcgctaaaccttctgggctaactaaacgatcatgacaatctaactttgcaatcgcttgtttatcttcactatccaatttgatatttacgctgagtaaattactggctaaattttcacgttttgttgaagatggaataacagaataaccttcattcatagcccaagctaaaatgatttgtgctggtgttgcattgtgttttttagcaatggtttgtattgtttcatcttttaatgctttgccgtaagctagagtcatataagatgtaatatgaatgccatgctgtttagcccaatttaccactttatgattttgtaaataaggtgataattcgatttggtttgttgcgatattttcaacaccaacggcagcaatagcttgttccattaatggaatggtaaaatttgaaataccaatttctcgcgttaatcccatctgtttcgcagctaataactcttgcataaattctttaacagaaactgcatcatttggtgatggccagtgtactagagttaagtcaacataatctgtttgtaaatcacttaagctttgtttcaaactaggaattaatttatctttacttaaattttctacccagatttttgttgtgatgtaaagcgcgtcgcgagatataccactttctgcaatagcttgtcctatagcagattcattttcataaatttgtgctgtatcaatagcacgataacctagttctagtgcagtttttacagaatttataaccgcatcgtcttttaaacgaaaagtaccaagacctaaaacgggaacactcatacatctctcctgaaaggtaataacagtaggggaattaagttgatatttgtgacaccttattgggtgcctcatcgtcatggtggacagtatagtcttttttattgttctaaaaacaagctataaagcaaaagacttttgtgataaaagcaataatcaaatatatcagtttatagggaataaaaagttcttggtataaacataattaaaaataaaataataaatttataattatattttaggtaaataaatacgtttttttattaacgatatatcatatgattatattttaatacacaattcaaccaacatagtttgcgatattttttaatatttgactacatcatataatattatttgattttatatgcactataaaaaatggttgttaggctgatgcgatttttattttttaaatagttaatcattgagatgttaatcacggtaattgattgtttctcattgctaatattctgcagaccaaaaaatatcaagttttttactctaaaatagagataattaattgagatataaattataaataacaagcaaatgaggcattatatgtttttatttaaaaaagctgttatcgctttgtcaattaatatcgcattagtttcttcggctctggcctgcacaacgttattagcagggagtgaagcaactaatgatggctctttgattgtagctcgtagcgcagatagtgatgctttaaaagcacaacattttgttattcatccagccaaaaataatcagactggtatttatagcactcaagcccatcatggcgctaatagctttacttatccactacctaaacactcattacgttataccactgtacctaattggaaaactcaattgcatggtgcaacgggttttaatgagctaggcgttggggtgagtggtacagaatccatttttgcctcacctaaagcattggcgttcgatccttatgttgaagatacggggatcactgaagatgatattccagatattttactctcaagggcaaaaactgcccgtgaagcaattgaattactgggaaacatcatcgaaacacaaggtgcgggagaaggatttggggttgccgtcgttgataaaaatgaggtgtggtacctagaaacaggtacaggtcatcaatggatggcgcaaaaactaccaaaagataaatattttgcaacgggtaatcaagggcgtttacaggcttaccatacagatagtaatgataatttaggttctaaaaacttagttgagtttgcaatagaaaaaggactttatgatcctgccactgatggcgaatttaatttttctaaagcctatacgcgtgatgatgaacgtgatctcacttataattacccgagggtttgggttatccagcaacaatttaacccttctctgaaacagaatgtggcagatggtcgtcaatttgcgcctatgctgacaccggagaaaaaagtatcagtagaagacgccaaagcgatgttacgcaaccattttgacggtacagaacatgatccttataccaatggattgaatggcaatgaaccatggcgaccaataagtgtgtttcgtacttatgaatctcatgtgatgcaagtaagacctgaattaccgcaagagattggtgaagtgacttatgttggtttgggaatggctgatctaaccgcttttgttccttattacagtggattaaaagcatatccgcaacactatgctattggaacagataaagcagataatgactctatctattggaaatatcgtaagttacaaacattagtaatgacagattatcctcaatttgctcctattgttaaaaaagcataccaagaatgggaagctaaaacagcattagaacaaaaagaaatggaggctaactatttgtcaatgagtaaaaagaataaagcagcagcggataacatgctgaatgaatttaacttacgtgtaatggctgatgcagagcaattaactgaaaacttaactaatcaactctttactcttaaaactaaaaatatacaagatgagatcttttttgctaatcaatctaaaaaagattaattactttaacatattataaatattaaaaagatctcaagatgcgtaatcagattgagatctttttatttctattagcgactaaagaacaggaatatagtaactaatttcttgtagatgctgctcactatggccgattaacttatcatagctaaccgattgttttaaggtataacgctcaatatcaggaccagctcgacgtagcaaattcatctttggcaatactttggtatatacagtataaataatatcatcatacccggtgagggaatctaaaatattatccatctcgaaagtaataactaaatatttcccattgggtaattctacgttagacatagtggaaatattagcagagcttgttaattgttctttacttactgctgttgtataaatataagtcgtatcatctagcgagcctgcagaagcacgatgtgtggcatacatttctgtagggatggtatgtatttcttttaaaaacttcttccaaaattcttttctaaattttttcttatcataattccatgctgaaatatttttattgtattgatgagccatacctatcaactctttagaaggtaaggtcattacttcatattttgctttaagttcaaccgtttctaatgctggaaagataagctcactaatatcccaaccttgctttttcctgtattcagaaggggtgatattaaattgttttttaaacgcacgacaaaacgtttgttgcgaatcaaaatggtattttaaagaaatatctaaaaggctactacgagtgatcctcaacgcataagcgccacaagataaacggcgtgctaggacatatttgcctaaagatattcctgtatatgctttaaataagcgctggaagtgccacttggtatagcctgatttttcagcaataatatctaatgataaacgtgaatctaagttttgctcgatccaaacaatgatatctttaactacattttcttgaagcattgatcttcccactatttcactttatcgatattattagattaatctattgaaaattaatcaaattattattttacaataatatcatattaggcagattctgttactctaattatggtaaaagttaataacaataatgtaaagttatgtatttgagttggtttattcttaaaaattaagctagtaaaactaatctagactattatacagtgggaaataattgcttagaaaatcgcttatttctttatattccccctataattaaatacggagatatcttattttttattttaaaaaagctatctaacctaattggactaaccatagttactttaattattttaggagatgtaaatgcgtaaattactttctatctctgcaattgctttattaacttcaattattgcaacacctgcattagctgctaaaacagaaacttacgactgtgaagggcaaaaaatcagagtttctttccctaatgatgatttggccgtaatggattataatgatgaattaatcgtgttaaaatctgccgtcgctgcaagtggtgcgcgttatgttggagaaagtttccaactgtggggtaaaggtagtgaagagttcaatttagcgacgatgtcagaagatgaaatagttaatgatcttattgctgaagatacagggcgtacttgtaaaatagtaaaataatttaatgattatttattgagataaaggcgagctagactcgcctttatttttaagtcattatatattttttatcggcagtttgttaggatatctaaatatcgattattttatctcagataaaatataactgtataaatcaatgcatactgagagttaaaatgaaatcttatccttagctagtttcaatattaattttaatatcagttttaataagaaactgaaaaataattattatatctatcattttttaatgacgggtattctatctataaattaattttggatacagtctaatgaaagttacaagtgccgaaaaacatgcattgttattaccagataatcgaacgttaacttggtatgaatctggcccatcagatggtcaaccggtattattctgcacaggtgcagggatgagtgggctattaagtatggatgctgatctgttaactaagttaaatattcgacttattacaccgactcgtcctggtttaggtgaatcaacttttgatcctaaaaagacattaaaatcgttttctagcgatgtattattcttattagcatatcttaatattaagaatatcagtgtgataggatcctctcaaggtgctgtttttgcaatggccatttgttactatggtaaagtggataagctggcaattgttgctggtcaagatcaactagattatcctgaaataaaaaaactgttgtccagtgatgtggttaatatgcaacaacaggcattattcgatcctgatggattaaagacctggatcattgaaaatatcaccgctgactggttaatggattttattttgaattatagtgctgatgttgatttggctctttatcaagaaaataaattttttcctgtttatcaagcttgtatgaaagaagcatttaaatatggaaataagggctatgctcaagatttattaatcacgatgcaaccttggggatttactccagaaatgattagcacacctacaacattatggtatggactaaaggatacgagtactgttcactcgcctgattttggcaagttattgtctcaacgttttccccatgcacaacgttatgtctatgataatgaaggtggctctttgttgtggactaaaacatcacagattttaactaatcttattagttaatctgagcaaataagcaataaaaacagtagatggtataaatatatcagtagatattgattgttttgtaaaattatcagtatctactttgagtaggcttattcccaataaatagctatctatttgtaaaggttaacaatttcatggtaaataaatcaaataaaaaataaatttacacttctataaaaaataaaagtgaaaatagtttgctataaaataaattctatgacttaatagcgtcattggtttggaagtacagacctatttatgttagtccagtttttagtagttcaccgtttagcgctatccttgatacctcttcgttgcgaattccttcaaatagtacccataagtaaaaatccgaaatcaaaccgcaattagccttatggcataactaaatttattaaaggaaattctatgtctaatacaatgactggtacagttaaatggtttaacgacgataaaggctttggctttatcacacctaaagatggtagcaaagatgtatttgttcacttttcagcaattcaaagcgatagctttaaatcactgaaagaaggccaagaagtatcattctctattgaaaatggtgcaaaaggtccagcagctgctaatgttatcggtctgtaataattatggattattgcgtctaagacttaaagacacttatataagtgtatcttactagacgaaataacttaaaaacctcactgatgtgaggtttttttatatctattatttgctaataaaaataaattttattctaactgatattattaaagtttggtaaatattcaccatacataaaaaaagaaaataaaaataattttacttactttgctattacatatttttccaaaaagattagaataaaagcaatcagaaaataaagctatgactggtagtttttttttaagaaaagaataggaaaaagccgtttaaaataaacttatataagataaatggtaaattttattaagtggtattcactaagtaacttatcttaaataactgttgtctaaattaacttaagcttaaaagaagtcttttaagtgacgaaaggacaaatcttgtgtacgctaaaaattctttttcactacatctgttacaccctaaatattttcttacttggctaggcgtatttattctttttttattagtacaattaccttacacgtggcttttattcttaggaaaacatttaggattactatcgcgtttttttatcaaaagaagagtttcgataataaagaaaaatttagagttatgttttccgaataagagtaaaaaagatatcgataagctagttatggaaaatttatcagcattaggtatcgctttattcgaaactggcatggcatggttttggagcgataacagactgaaaaatatctatcaagtcgatggaataacaaattttactgaggctaatcgaaagcataccggtattttgttgattggtattcactccatgtcgttggagctaggagggcgtattatggggttgtgcttccctgtaaacgcaatgtatcggcctcataataataaagcgatggagtttattcaaactagggcaagatgccgttctaataaaggtatgattgatagacgtaatttaaagtttatggtcactgaattaaaaaaagggaaagccatttggtttgcaccagatcaagattttggcttaaaaggaaccaccttttcaccatttttttcggtgaaggaaacgtctacttcaaaaggcgctgttatattagcaaagttatcaggagctccttctttaacggtaacattggtacgtaatcatggtcatgataataaaaaatatagcttaattataggtaaagagcttcataattatccaacagaaaatattcaaaatgatacagatagaatgaatcatctgattgaaattgagattatgcgagcgccagagcaatacttatgggctcatagacgctttaagaccagacccaaaggtgaagccagtttttattaataaaaaaagaccaacacattaagtgttggtcacagtaaatactggaagcaatgtgagcaatgtcgttgcaaatagtttagtaaaacactcaactattcacgagttaaaagataatcattctcaactagattgtcaaccttaaattttataaggggataagtagtgtgagggtaatgtaaaggcctactctagatgccttggtgccttgtataattttttctttttaataagatacataaaaattggtacagactaagggatattatgcagagttatcactctctatcggctcaagtttatcaattggataaaccgataggatgcagtttcggcgatgttgaatactatcaacagcgattaaaagatgttaaaggtaaaattttagagccggcagtaggaacaggacgtatccttattcctttattgcaatcaggttttaatattgagggatttgatctttccgaagagatgcttgaattttgtaagaaaaatctaatcgagcatggatttacaaccaactacgtaactcaaaataatttagtcacttttgaagttaatacccctgtcgaggctattattattcctacagggacattcctcttattaaatacgcaacagcaggcgatccaagccttaaaacagtgttatcaagcgcttgagtttggtgggcgcttattggttgatattagtcttgcccatcattttgttaaaggtgaatgtactagtcgccaatttaatacaccagaaggcgatctaattaccttacagataattaatgctgaaattgattatataaatcagttaactacttcacaccatcgttatgataaatggcgagatggcaagatcattgaaagtgaatgggaagttttcagcttaaaatggtttggtgtgtctgaatttgaacaaatactacgcttgattggttttaaacagatcacaatatcagccgattaccagtatctgcaaacccccagtaatacgacagaaattatgacttttgaagcgtataaaaaatagcattaaataataagaggctgtatttaaagctaattttttatagcctcatttatttcgcctttctaaagttaatcagaatattggcagttgtatttttatgtgtggaattataacgttgtaaggcgtccttttaaggaataactcacatgaaaacacccactttattaaagcatggcttaatagctactttgacctttatggtttctttgaattccttcgccgatcccggaaagggtaaaggtaatggaaacggtaacggtaatcctcatagtcatcaaaatcaaagaggtaacaacggttttaataaaggacatcagaacgtaaaccaacaagatggattttcttcacaactgcgtattgatagtcgaggagggctctctgtctcaatcacttatgatgatgcaagagcattagcaataaagaacaatctaactggatataaaggccttcctccgggaatagcaaagaatttaacaagaggtaagccattacctccaggtattgcgaaaaaagccgtacccagcattatgctaagtcagttaccgcattacgatggatatgaatggcagatagtgggtaatgatttggtgttaatcgcaataaccacatcaattattgcctctgttattaataatgtttttgattaaggtaaaacatagcctcattttaatgtcatgttatatctgcttcaaaactataaaaccttcctactaacagggaaggttttgtgtttattgaaaggcaaaaataaaaaaaagaccaacgctaggagagttggtcaataaatactagaagcaatgtgagcaatgtcgttgtgaaagaccgagtaacgcactcaactattcacgagttaaaagataatcattatcatttgggttgtcaaccccactgaaattgtgactactattttttgatataaaaaaccaagtgcttagctattttataaaaacaagtgttgggtttttattaataataacaagtagatctgcttctttattacaattaatcgccttttctatggcacgcattttttttatcttttttgctaaattcttaacatgttgagagcgtaatgacattgttggtttaaccatgatatttctccttagtagtagaagagataacaatagtagggatattgactaaatgcaaatgataattaatatcatttgatagctattaataccctcacttattaaatgtgatctgtatggagcgtttttattgcaatttttcttgttttttcccgtcaatagactaaaaaataaggataaagtacttgagataaattttttatcagaactaccttctgcaaatattctatttagtgctataaatctcaataattaatattaaaaattactccgtaaatatagaagtattatattttgtataatttatattttaaccatacttcatttgaaattttttatataagtagtatggtagttagcagctattaaaaaatagcaaagaaataaaaaatttatttttaataaatctaagaggaacccatttactctaaaataattgaggaaaataataatggataatagtgataagtttttttctaacgatatatgtcctaaaactgctttatatggacaattttatgggaatgatcaatacgcaggccgtgaacacgaaagaaaaatatactacggcagaaaatttcctaaaactaaaaaaggttattattttaaaaagctaatgaatttttaataataaaaatcattatattaaataatatattttcgaagtatttataagatgggtagtcttatataaggttatccatcttggatgaatttatatatttatctgtggatattatataaatataataatttaaaaggtatagtccgtttagactatacctttagtgttattttatcgagcaattaatgcaaataccccccagcctaagtattctcgtgtaaaactaacatgacgtttaggggctatggtcaattccgttcgaatttcttgagcaaaatcatcggcactatttttgtcaagccaacggcgcatagtcatccatttagcagcttcatatctatcccaaccctcttgatctgccagtaccatttcgactagatcgtatccttgattgtcgaaagaaataacaagctcagataaagttaaaaaatctgatatggatgaagcaccacaagcttgtgctatctcttgtgttgttggaatttgtcgccaatatggttctccgataagaataagcccacctgttttaatactttttgctagtagctcgatagtttcaattacaccaccagcaatccaagttgctcctatgcatgctgctatatcacattttttatcactaatataatctgaggcatcatgatggataaaatgtactcgatggctgacgcctaactcttctgctctagattttgcttgtagagtaaacaacgggcttatatcgatgccaatacctgtaatattgtaatcgtgagcccaagtacatagcatttcaccagagccacttccgagatcaagaatttgccagttttctttcattcgtaatactcgacctaaggtggcatatttctctggtgtgaaagggttatgaatacgatgctcactttcgctaatagtgaaaatacgaggaatatccattttaatttcctttaattgttataaaagagagtgtggacattattaaacctagtaatattattgatataatattactatctaactgatttaatttgctttttaatttttttagaaaggtaagcttatacgttaggacatctagattttggcaataatctttaataagagtgatacaactagctatagcaccaataaacgtaaattgggtagaaataagtaaagaatagtatttttgatgtgatggatccatactagaaaacctgtttaatcatcatatgcaatataagcaaacatattgtggtgcttgcatgagaatacagcgcattgaaaccagctattcgccctaaaaggtcgaaatagtggttattagatgattacattttccagcatcaaagcctcagataggaattaaaagttgtttacactaggacattttcatcgattttttagatttgtaaatgcgtaagtctgtaaagtgtgagccagatgatagttttattttggttgagccatctatttacaatatatcaaagtaaaagatagtgaacagggggaaccccgaaccttggccgacgcttatcttgcagaccaaactatttcatgcggtgttttatcaggtgtatcgtaaaaccttgtcctcagtgaagagagtagtgcagaagctatgtttaataagaatacaaaataactggttataaaaacagtacttgcttgtgttgtgtccgtgattatcttattatttttaaatcgtgggtgacttattacttaccatactaaattttatcaatacctagggtatacaggtattaaacttattattttgataatgtgtatctatataggaggatgagtgaaaggcaaaagagttgttattgttcatggctatactgcatctcccaaggataattggtttccatggttgaaagaagagcttggatcattaggatatgatgtcagtatacctatgatgcctgagcctaatcatcctaaccctaatgagtggcaacaaaaacttgccgatgaaaacataatacttgataaagatactattcttgttgggcatagtctgggatgtataactttattacgttttctttctgaacaggcttgtgaagatataacaataggcgggtatattttagtcgctggttttaatagtgaacaaaaaactttacctgagttgaactctcatatttataataacctgaattatagtaagttaattaaaatatcggataaaagggtatcattaatatcatccaatgattggattgtgagtcctgattcatccaaaaaattagctagtcaattacaaactcaaattgttattgaagaagatgcgggacattttcttgataaagaaggctatattaaattgccagtcatgcttgatatttttaaatatatgctgaatcaatataagctataaatacaatatcagaatattcgtcaattggtttttatcagtcatttaaataaaagaaagaaaagtcgcctttacctttataaaaggcgactgtttactcagcgtgtggtgttatttaatggcttttctgtgaaactaaaagcccaatccctgcactagctaataaacttgagcacatacgattgaacacttttttagcatgtggttttttttgcaactttttcatgtgtaagcctaaccaagcgtagagcattattgcaataaactcgagtaacaagaataaagaaccaagtattagaaactgggaactagccggtaattgtgggctaacgaattgcggaagaaaggccgtaaagataagtattgcctttggatttcctgctgcaataaaaaactcttgccttgctaataaggttattactcgtaattaagatgaagcacttggaatggttgcacagcatttaggtatgttgaaaaaatagaattaactggtgccgatggtgaaccaattcaagcaactgggattggcctagggcacctaagttttgaataactaatgaagttgaggagtaaagatagaaattaaatgggcagcattattaaaagctccgttcctgatgaagttatatcagtaacacctgcttttttagcttcttcacgtaaatttgtagaggcccaattaccgcagaaaatgaaaattggagtttgaattttaagatctcttatttttttgtaagagttatgctagctcgatcgtcttcgggtctccccatatctgatattataacatcaaagttattgctttttattttttcaatggcatcacttgttgaaagtgaagtatctacatctatatgatttatttttagtgtttcaatcaaatagctattatttgaagggttatcatcaacccataagaccttttttttcattggaatattaggcagtgaaattttttctgaattaggatgtaatgtgtgtattttctttcccatttcaacaagtttagattgtagatctagaataatgtgaccttgttgtattgaattttctttcaaatttagttcaaatcctgaaatttttatatttaacttgccatcaaagaaagtatctattagctttaatagatgctttctaaaataaaaaattaaaaaacatacaatcaatggccataataaagaagatattaccacattcccgttttctggccatgacgcaagcattacgcgatttatatcagaagaaaaaaggtagtttctttacaactaaaagatgatagagattacctcgcctatacaggcgaggcttataactattattaaatattcttttggagttctttacgggttgctgtggcaataaatccgctacgactcccatattcaggatttgtttttacgatagtatcgatgcgactcaataatcgatgtggcaatgtgatattaatacgctctgctcgtccgtcgtatttatccatatcaacatcaactaaaagccatattccattattgtaatcaccactagaattaattaaatgctcttgttgagattttggagaggggatatctaaacccttctcgcttaacaattcaaaatgggcatcaatagcgctcctcgcatctgcgtgagcttcttcaatactgtcccccgcaaagatgcaaccatcaatatcagggaaccagccacttgcgctaccatcttcatcaatttcaataaaggctggatataacataatttcatctccataaagagcgcgccctatatgagcgcattcttaattaatttttcagtttggcacttttaataatttgatttaatgttcctttttttaaatcttttcttggatgcggtactgttacaacaaaagaaaaatcagggtgagtaaattgatgatgacttccttttattctatcaagtatccatccgtttttttctaacaacttaatcagttccgaacttttcaaactccctccattccgtcaactgatatacacactatacacactaagacgtaggcaatcaaatattttgtgtgtatggtgtgtattttattatctataataaaagatttgccatgtagccgtttaaaagaaaaaattgcagagcagatttcaccgccacagaggtcagcattcacaactgacttatatcctgcgctggcgcgagaacaaggctttgatgggattgatttaccccagcccacaattgcaggtgttgcgatggatagcattgatagctatgtgccctcatttaaaggggaacaagtttacggtgtgccagagtcacaggcctcatggtatgcctcacaaatgtttatcggcaacaatatgtgtgcggttatcgctaaacactggctggtggataaagcctgtaatatgcccgcgcgtgatgcgatacgtcagggttacgatattgattgtgataacgacgatgatcgtgctatcagtaaaaagcatcgcaaacgagataaaaataccgcattacacatcagcttaaagagcaggttcactttgggcatgtatacggtgatcgtttagcattattcgttgtggagacatcaaatccgaaagagtggtatgaaaacccgtttaatatcgatggtgtgaccaaaggcatgtacaaggggattaaacagattgatccacaatgggtaacacctgatttaacggacgccaatgttcaagatcctgccagcatggatttctacgaaccaacctattatgtgattggtgggcgcaagtatcacaaatctcactttattaagtttgtaccgtttcctgtgccgaatgtcttgaaaccaatgtacaactactttggtgtttctgttcctgagcgcatttatgagtgacacactatgcaacggctggaagtagctacacaaaagaggaaagtgacgggcgttatcaaggttagggaaattatcaactagcgggcaattatgcgctagtaggtgcttcgtatactaaggctgagtctgacggtaaatatcagcctaaagggaattatgtcccagtaggcagtagttatactaaaaatgaatctgataatcgatatgaaaaactaggtaatttaaaacagtttaaaaagcctacctcaacagttaatgcagataaaacaatagttaaattcgaatcaaatgtgattggtaaacagctttttgctattgctagcgataatagggcatatccttttactgtgttaccacctccttataaatctctcattttgtggtatggtggtaatcagttctggggatcaaccgttactgcatctagtgatggaaaaacactaacgatacatcatccaggctatacagggcctacagatatgtatgtcttggagtaagacagaattacttaaaatttttatcatacggacaccgatagagtgtccgttattgagaattataaattaagtaatttacttttttgttcttggaactcttcttctgtcagtacgccactttcttttagttttcctaatttttctaattttgatagcaagtcatcaccactgttatttgaagattgcgatgaagagttattttttttagataggataatatcaactagtggttgtactgagtttttttgtagtgtaccaatttcataaatagtaccaggagtatttatttttattttactcctgtcaatccggaagatgagtcaatagaagtaattgcatcatagtttactgaagataaatcaacttttttatggaaaatcccactttttttatgcagaaaaataattcgtttatttgtaggtatgatcaaccaaatattagattttacgattccgctattaacacataaaactgtttcatcattatttaataattcaggtaatctagtaaatatatcaaaaacacccattgttgatttataacttgttaatgctgtaagtcgattaaactcttcttttaattgttttttatcgcattgttttaagtccattataatctctctttttatctaaacactaaagaaaatttaatagaaatagatactaacaaactcctaagtaacaagcgagaaagatggttttaaattactcaaactacataagttttttatgttttttgatgttagtaccatatttttatgattgaaatacctccccaacttctcaaacaaatccctcgccacagcctccgtcatatacgtcctcatcggttccctacgaacattcttcatttcaaacgtattcttatcaaaccttggatcagaaaagacaatatccataaacagatagccacgagggttatctacagataaacgagcttcttctaactgagcaatatattccgtattattgatttcaagcttaatcatagtatcacctatttaactgtgtttttatacagtaatttatataagcaatgaatagaatagcaaggagaaaagggcaattttatgagctaaagaaagggggattttgagagatgatctgtcgtcgttttaccagagttttaccagagttttaccagtggcaaattccagacataaaaaaaccaaccgtaagtggttggttttcttaaataaaaatggtcggcatgataggatttgaacctacgacccctgacaccccatgacagtgcgctaccaggctgcgctacatgccgattgtgcttagtatattactgttttttactgctaaagcaaccccttagatacttaactgctgtatttttattcattatagtgacgtcagttgttattaactttttacttatagtctttttttaatactaacgctcaataaatcgtttttgctcagcaagtacttgcaataataggcgtaaatcaggtttggcggattggatctctttgcctgatttatcaaacaaagcatatctgccatgtttatctatcattaacgtattatcttgtaaaaagaccactagagtttcattatcaccagtaaaaatccaagggtgattacgcgtattagcaaatagatcttcgccttgagaatagttatctgcagggctaataacacctaatacatgttgcattagcgttgtcattatatcttggtggctggttagtttatctagtttttgtggtgtaacattaggccaatgtattaccagtggaacctgcgattggcttaagttaaaagtgtctttgttaacaagccattggctatcttgtttatcattgttctgatgataatttgacgttacgaccacaacggtattatcaagtatgttgctttcttttaaagtagtaaaaatggtctctaattgactatttaactgtgcttgagaagctgatgtatgcttatcaccgttgatttgtaagaaagagaaccaaggtgtgctttgtttattttttaacaaccatgaacgccaactattaatcgttgtgtcgttatcctcactacgtgaagtaggtagtgagtaatcagccagcaccgcttgtgtaaataatggcgatttaaatccgttagttgaaaatagtgctaattgatagtgacgataatttaaagcgtcaaagagcgctgagtttttgcggctacttaacacactatctaagtaagacggtgaaatgccataaaataatccaaacagcgccgtttcgttatttatgcctgctgaatagtgctgagagaaagagaggttattatcagcaaattgttgcaagctcggtagtttggcaacgtcttcattacctaatccatcaaccacaatcataagtaagttatatgagctttcatctttagaataatcaagaggtgtaagcgggtaggtgatactctgtgccgcaggattaccctcgctcattaagcgctgctcatactcagattgattaataaaaccatgccgttcaaggaatttacgtgcagtcattgggtaagacagtggtaagtttgcacgttgcatagtaatagggcgataaaaattagcatctgcccaaatagacatagagtgggataaaataaagcaactaataaatacacaggctaatggttttccccatcgctggcggtttaagctgcgcagcttttgccaactccatgtagcaaatagcatttcgataagaaagataatggggatgccaataaagataagttgccattctcgcgccatttcaccttcatctggattgataaccaaatcccaaaccaactgggtcaaatgaagttgaaattgctggtaaacagctatatcaaaaataagtaatgtcaatcctgcgctagctaaggcgcaggatatcaccctaagtaatcgttgcgaaactaccacaaaggtcaacggaaaaagaataaggatataaatagcaaacacgataaaactaaaatggcccatccaactgacaatagcgtaaagacgacctgcaaaggtacttggccaatcagcaataaacaggtaacggctcccaagcaaaaggcttagaataatattaaacagcgcaaaccagtgaccccaactgatcatttgggatactttttcacgataggactgatttctcgttaccatgtctataaatatttctgtgtttattagtgaatattgccttcatcaattgaagcacgtaaagcgtgaacaaaagagtctgcaatcagcattcgttgagcaggggcaatacttgtattgattaagtttgtcaccatgttccccaacaccatcaaagaaagatctgtaggagtatgatgtttttcaagaacgctgacaagttctgcaagtaattgctcaacttgttcatcactataacgggatttttgtggcataaaatctgaattcctactaaatggataaaacgctatatgttaccgcaaggcgtgttatttttctgctattaaattaattattttgcggttataccccttgatagtaaaagtaggggatgtttgaatacgcgcacaaaaagaatcgggataaaggagggcgcccatgagtctagatattaaccagttagtcttgcaccaacttattaagcgtgatgagcagacattagaagtggtacttcgtgattcactcttagacattgagccggttgttcaagagatggtcgaagagttacatcgtgtttatagtgcaaaaagtaaagcctatggtttatttaatgaagagagcgaattagctcaagcattacgtttacaacgtcaaggtgaagaagaatttttaggtttttctcgtgcagcgacggttagacttaaagatgagttagcgaaatacccttttgctgaagggggaacggttcttttttgtcattatcgttatctcgcggtggaatatttattaatcgctgtattgaatagctgtaatagcatgtgggtcaatgacagtcttgatgtatcttcaacacgctatttagatattcctcatgcagatattatcgctcgtattgatttaactgaatgggagacttcacccgattctttacgttatttaaccttcttaaaagggcgtgtaggacgcaaagtttcagatttctttatggactttttaggggcgcaagaaggtttaaatactaaagtacaaaataaaggcttattacaagcggttgatgacttttgtgaagcatcagacatgaataaacaagagcgccaaacttgtcgtgaacaagtctacagctattgtaatgagcaattgcaatcgggtgaagagattgcattaactgaacttgcacaagagttaccgccattaggtgatcaaaactttgcacagtttacagaagaaaaagggtatgaattagcggaaacttttcccgcagatcgcagtacattacgccaattaatgaagtattcaggaagtggtggggggttaacggttaattttgatgcgaaactgttgggggaaagaattttttgggatcccgctaccgatacactgacgataaaaggaactccacctaatttacgcgaccagttacagcgtagagtctcagaaaaataggcaatagatagaaacaaataacgccacattaagtggcgttacatgctcggcgtcccgaaaaataaagctcgaaggttggcttattaagcgcgcaggaagtcaatatgagtaatttttggcttatactcgtgacgttgcactgctttaactttaactttagttgctttaccatcgataacgaggttaacgaaatcagcgtagaactcagatttgtgttcttggttgataacttcgttgtgatctaaatcgatagcgattggctcttcatttccgccataaacgatagctggaaaacggttagccacacgcaggcggcggctcgcacccttaccctgctctttacgtactgttgcattaatagttaacatcttttttctcttatgaaaaagaaaatacatacttgttacaggcgacccagcaacaagctcgagatttggtttatctaaaaacagataaagcggggcgcattttaacgaaaaagcactctaacagcaaatataaatcgactttaatataaggtatctgctttacgaaagcgtccatgatagtcaaataacttattacgaatttgccaaaagccgtcttttttatttttttgtgccacaataaaatcaggataacgtaataaatcaaactgattaataatatcttgagcgttatgccataccaaaggaacgccaggggcgcgctggtgttcgtgtaaaaacttgagttcaaatactttacgttgggcaggcgtttttaaacgaaatcgttctgaaacagaagtaccttcttcatcataatagttgattttaagccactcacctttttcatcttgaccactgagtaattgcattcctccacagcgaaggataagggcgccttttagctttaaagcggctttgagcatatcatcaggatcaactaggatttcattacagtgcacacaacgccgtgcggcgatatcattttcttcattacagtgtgggcataatttaaaacgaaagcgataatcacactgttttttttgtccttgctcatcaagctcccaaccttggcaacgtcgcccatagtgctcaataatatcgccatctgcatcaactatgccccagaaagtgttagcgaattgacagagaggacaaaacacttgtaccggtttgctatttggattgggctttttactacccacttcaggaagataaaggtcgtgagggttacctgcataatctaagattaaacattctgtttttcctgcaaataaccttaatcctcgtcctactatttgttgatataaactgacggactccgttggacgtaaaatagcaattaaatcaacatggggcgcatcaaagcctgtggttaatacagcaacattaaccatataacgtagctgttgctgtttaaactgtgaaattaatgcgtcacgctcagaagagggggtctcagcactgactaacgcggcttgtccttggggtaataatgtgaagatttctgtcgcatgttcgactgttgccgcaaatatcatcacaccacggcgttgttcaccgtattcaattatctgtgacacaatatggggtgtaatacgctgttgtttttttacttcgcgattgagatcttcttgattaaaaataccattttggctagttctaacttggctaaagtcatattgcaaaataggcatatctaaacgtgttggtgggactaagaaatggtgacttatcatgtagcgtaaaggtaattcataaatacagtcacgaaaaaagcaattgtcatctccttttaccataccgtgatagtgatattggtaaatccaaccagtcggtaaacgataaggagtagccgttaatcctaagatgcgtagttgggggttaatggtttgaagttgtttgatcacttgttggtattggctatcttcagacagactaatacggtgacattcatcaataattaatagagaaaaagcatgctcaaactgcgataagttacgtgctaccgattgtacactgccgaaaacaaccttgcctcgactctctttttgctgtaatccggcggcataaatatccgcagatagaccataggcttcatatttgctatggttctgctctactaattcctttacatgtgctagaaccaatacccgcccacgtgctcttttagcaagttcggcaatgactaagctttttccagcaccggtaggtaatacaataagtgctggtgttttatgttggcgaaaataagtgattgtcgcgttaaccgcgtcaagctgataaggtctaagtgtaaaagccataaccatacatcaaaagcaaaacagagcaccagcgtagcactttttagcgatgagtgcgaacagaaagactgtaattaaatacagtgaaaggctaaatgatttaagggtaaattaattagttgttttattgttaatattcatttttaatagatgcctcatatcagatggtactcttccatttttcagagaaattcatgcgattagataaatttttatcccagcaattggggattagccgtaatttagtagctcgtgaacttagagcggggctcgtgactatagatggtgaaatggtaaaaacaggtgcgactaaaatcacacctgaacaagaagttgcttatgatggcaatgtgttgacacaaattttaggcccgcgttattttatgttgaacaaacctattggttatgtgtgttcaacggatgatcctgttaaccccaccattctttattttattgatgagccactagcacataaattacatgctgcggggcgtttagatatagatactacagggttagtgttattaaccgataatggtcaatggtctcatcgtataacggcacctaaacatcactgtgaaaaaacgtatgtcgtaacgctggaacagcctattgctacggatgtcgctgagaaatttaaaacaggtgtccagttaaatggcgaaaaagaattgactaagcctgctacattggaagtaataacaccgactgaggtaaaactgaccatcagtgaagggaagtaccatcaagttaaacgtatgtttgctgcggtgggtaatcatgttgtcgcgttacatcgagagcgtatcggtgatatcacattagatgatgctttagcgccaggagaataccgaccgctaacagaagaagaaatcaatagcattcatctacctaaataataattatattttgtcgttttttggagtttaactgcgtgcaagagcaacgtccgtcgtactttagcctcattttaatattggggcttatttccatgcttatgccactggctatcgatatgtatctgccaagtttacctactatagcacgggattttggcgtgcctggtggccaagttcagatgacattaagtagctatatctttggttttgctattggacaaatggtctatgggccgatggcagatagtctagggcgtaaaccggttattctaggtggtgtgattgtttttgcattagcatcgagcgcttgtgcattatctgactcgatcgatatgctaattggtatgcgttttctacatggatttgctgccgccgctgcaagtgttgtcattaatgctttaatgcgggatatgttttcaagagatgagttctcaagaagtatgtcatttgttgcattagtcatgacgattgccccattattagcgccattacttggtgcttgggtgatgaactggttctcatggcatgctattttttggagtatcgctattgcggcgatcattgctgctgcattaattgcgctctatataccggaaactttgcccaaacagcaccgccaacgctttagtctacgagtgacatttagtcaatttattagcttatttagagcacgtcgagtactttgctatattctggcatcgggattttcttttgcagggatgttttcatttttaagtgcagggccttttgtttatatcgaactacatggtattccattcgaccaatttggcttgtactttggttttaatattattttcttgattgtcatgaccagtatcaatgggcgctatgtgcgccgatttggtgcactgaatatgttacgttttgggttaactgtgcagtttttaatgggcatattcttaatattggtggttgcccttaatttacatttttacttccttgttgtgggagtggctatgtatgttggtgggatagccatgataacctcaaatgcgatggccgttattcttgaagattatccacatatggcgggtacggtatcttctttagccggtactatccgttttggtgtgggggctttagttggaaccgctattgcaatgttacccgctaaaactgagtggccgatggtgagttcgatggcattttgtgttatttgtgccatgagtttcttgttacttgctcgtcgttataaataagaatatcacgctataaatacactatatttatagcgttttcctttctatttatctttaaaatgtcattatcaccatgtttttcactaaatatttctctaaattctctcccttcaatgtaacttatttgatttgcatcaacacttaatgttgtgtttttgttaaattaactagggtttattttaataatcatctattattgttttagtaatatgaaatatcatgataaaaattgatagattgttttacttaaatgcgtaaaattttatgcaattattttatatagttgataaaatgttaaataaatgaaagaataattgaaaagggtaatcagggctgatatgaaggttgataaaggttaagcgaaataaacagcttaaaatacctctctttttgtaagattattgtaacgttcatgctttatttttaacaatattttaatatgtgtgtgagcaagtcagttcaaactcgtattgatgatgtattaaattaacgtgttgatgaaacaggattgatttgtggaaaatgtacaactttcggtggttcataagctgccgctgagttatcggtggctagcaggctttacaggaacaagggtagaaattctacctgagaatgatgctagtagacaaaataccttgattggcttaaaactgttaagtcatgatggtatgactttagatgaggcaatacagaacttacaaaagtatctgaataatctcaatattgaaaatgtgattattgagtgggatggcgtaccttgtttatttttacatagtgatgatgagtgcgcagcactttgttgcttaaaaaatgctggggttgcaattgctgagccatttccaacagactactcttatctgtagttcttttttgttcttaatgggtatttctctacgacatatgcacaatctatagctatgtacttagataaaaatactcactaacgatggctatatggctctgttatgcaagaaaaaacaacataaaaaagccccatactcaataagtattggggcttttttattgcgataagatataagggaaaattttatcttaatgacgcttgagaatagttatcagcaagacttgttgttgtattattatcaatgatccgacgtgctgtatagaaacggtttttccaatagacattggacatttcagaaacgataacaccactactggttgacgcgtgaacaaacttatcattaccgatataaataccaatatgacgcatagtgcgaccagtcttaaacagtactaagtcacccgcttttaaggttgaacgattaactttggtaccggcaaattgctgatcggaggttgaacgaggtaattcgacaccaaattgatcacgaaaagttctttggacaaaagcggaacaatcaataccactttttgtattgccacctaagcggtatgcaacacctttccagtctgcatattggtcaagtatcttagattttatatcgagattcttcaccaatgattcaaattcatcttgagatgcttgggaaatagatgtgcttgaagatttattaagtggggcagttgttgaattagctaagcgtgaagacgcgttttgtgaactacaggctgataacgtagctacgacaataaacgccggtatgagcttaagcattctcataaacggtttatttctcattgtgacagatttcccttacatccttatgtgccagatgagcacatgaatattcaccaaataaccagagaatatagtgtaatttaactctggcaaccctatttcgcgaaaaacgtgctctaaagcacgtaaatatccacattaaacaataaataatgtggaaacgtaaaaagtttacataaagaaaagtcaaatggcgagaggaaagaggcttaatttacaaaacattagataataaagaacacatactaaaaatgattatctttttgttataaaactatcctttacagataaaaaaataagcgctcagtagggcgcttatttttacttttacttattttttatacttaattagctaaatgcttttttgcctttaaaagggagatgttcatctagccaatgaatgatgatatcggatgcaggggttattaataaccagcttgttgtgactaaagtgagcgagatagagccaactaagatatcagaagcccaatgtgcgccagccataacacgaggtaatgaaaaaattaccgtaattaaaagagcgcataaaaaagagcgaaatgaaagataacgtaatataaagctacaaaagatcagtagcatcaaaccatgatcgccaggaaagctatcacctgatgcatctttagtcggtattcctgtcactacacctacgcggtgtacatcgtgaaaatgaagtgttgggctaggtctttcgataggaatattttgtccaatctgattaattacgattgcacttagcaccataactatacccacaataatgagatggcgtttgccctgataatctttctgacgaaaagtatggtaatacaaccctcccatcgccagcagaataatcacatcgaatgctcgattattgacataagccacaaacatagcaaaagaagagtctggcaatagttgccgattaaaaaaataaaagatatgtgtatctattgaaagccaaaagccatgttgtgcgggaagataccaagataaaaaaagagtcaatccaaccaaatttaacagcaagataagagacaatttttgtttagcagtagaaagtttcataaggataattaaaaaattcgttgattaattgtgatctaaatcacaaatattccaagtttatggcagggactatagccaaaataaaaaaaaatatctttgcaattaattgctaaggcaaatgttatctttttgtttcaggcttgttagcttctcttatcttgatataagtcaaatatagaatattttttattgatagtcttaatttgagtattttataatttctttctaaactttaatcaaagataaaagttaaataaataaagttactagccgatattagttattagtttaatagcatattggctcgtggacattctgtacttaaataaatgagaggaggtttattttgaaaaagataccgatagttttagcatgtctaggtctattattaacggcacctagtttagcacgtgaaagtaaagtgttaggttcaacaacaattacttttgttggtgctattgtcgaaggcggatgttatgcatcatcagaagaaaatactgttaaaacaagttgttggaatggtaaggagatgaaagacttccaatataaactagatgctaatcagcaatttaactcgcaattaattaataataaaggttttatggatatcgaatggattaacgatcatttagcagtaatgaatattgtttataattagttaattaatactaataataaaataaagtgtgttaattaaatagaaagttgatgtttaaataattaggttattaaagttatgaatatttgacttaagcttaaatcaacgttgattttttatttataaataaaaaccactcatatttgatagacatcaaacattcttattgtgtctatatgaatgtcatattttattgctatgataaaagtatgtcgagtaggcgtgatcctcatacctactgcgcaaacaagaagtgaggtcgttatgaaaaaatatctgaccattttatgcagtcttctcgtttccagttcgatatcatttgcttgggcgtcaacagcacagcaaaccacaggacagatttatgtacgaggagcgattgttgatccagcttgtgaaattaatttcacactcgatcaagctgagtaccaatgttacaaaaataacaaagtctttacatcaacccagtctattttccctacctcttttgaacaatcatcatcaattatactgcctcaaaatatggggaaagctgaaatccgttggatggatggcgctgaaaaaaatggattgattaatgtgcaatatttttaattgtgtattgacagggaatgattaggtaaacaagtcaaataatcgttgtcacagtgggtttcttacgattatctgacctatttagcatcacatcagtaaaatattactttgtgagggaggtttttggcggttaattaatcagcacgccccatatagcgacgttcagcaatatgaatacggattttatcccctgtagaaagatattcagggacttgaatgactaatccagtaggtaaagtcgcaggcttagtacgagcgctcgctgacgcgcctttaatgcccggtactgtttcgataatttccatatcaacagtttgcggtaactctaaagctaaaacttgtccatccatagttaaaacctgcatcccagctaagccttcttctggaataaacagcagctcttcttcaatctgatcttttttgaaggtgtaaggtgtataatcttcattgtccataaagacatattcatcaccatcgatatacgagaaactgactgcacggcgtgttaagttgatagtatcgaggatatcatcccctttaaaacgttcttctactttttggcctgtacgaatatcagtaaagcgcattttatacaaagtacttgcaccgcgagcacttggcgcttggatgtcgatatcttttaccaataataatttattgttataactgatagccataccgcgcttaatttcattagcttttgccataggtaaccttctataaatagcattgacgataatggcgacaaaattactcgtagtactgaaacttggcaagtatttcgcaatatttttttggcagaagaaggttcaagccagcatattgctggcttgacggaagatcagcggtaaataggtaggagattaaagtttgctaatatgtgtgcaatcgcattaattgcaccaaataagatcacaaagataatcataaaggtgccaccaggtgctttaaagctttgttgctgatgacgttggcgactggcttttgccattaatgctggaataatcgccgcccaaatagtggctgcaagtcctgcaaagccaatagcatacaagaagccatcaggaaaaataatcgctagaatggtaggtggtacaaaagttacgatggctgattttaaacgtcctgtcccagtatttgagaatttaaagaaatcagctaaataatcaaataaccctaaagacacgcctaaaaatgaactcgctaatgccatatatgagaacaagtctaataagaatgaaacggaagtatttgctgtattgatacgcatttgtgccagtaagttaccaatatttccgccttcagcaatgacttgtttaaagccttcacgaggaatattaccttgtacaacaaactgccataaaatgtagatagccagcgaaatcaaggtaccaattaatagacttttcatcacggctttaccgtctttacggtagtaggtgactaatccaggaatattgccgtgataaccaaaggaggttaataaataaggtaatgcggctagtgcataaggtaaataactggcatggctttctgttgtattaaataatactggcattttcacttcggtaaataatccaccgatagcaaatacaaaagccacaatcataccgccaattaatatggtacttaagcgatcaacggctcgggttgataaccaaacgaagaaagcaacaacaagggcaaatactaagcctgcaacggcttgtggcaagctaaccacattagcaaaattttgcacaatgatggagctacctgcagaaatataggcataagttaaaatatagagaacaaaagcaatagaaagaccattaatggtactccatcccttacctaataaatctttggtaatagtatgaaagcttgatcctagggggtagtgaagattaacttctaagatcattaagccagacataaataggcaaaaccaagtataaatgagtaaaaagatagagccggtaaaccacacaccggaagtcacaatagggatggagaacataccggcgcctaccgccgtaccggcaataatcatcgcaccaccgagtatagatgggcgtttagcaatggatgtgacttctgacataacatgtccttataaaaaatgactcaatgtactagcttgatagtgtagagaatacacgcttgatctgagggtgtaaatagagcacttccttgtttattaaataaaaaatgaataaaaatagtacaataagtttttatctttatataaatcaatgggttaaatcatttgcactcaaaaataagccaaatataataaaggacattaaacagaaaaaagatcacgttgaataataactaagtaggggaaaaacattattctgaataaagaatattcagaataatgatgaagagtgttaattaaggttgatagaaacgtttacttttccataaagcaatagaattacggctcgcttcaaaatggggttcaggtaaatcatcaggtgagcaccagcgtagttcagaacatttatctggctccattaacttaggctcgccaccttgatattgcgctagcatacagatagatacggtatgtttaccttctaattgataagtttgtagattgttgctgatcccaatcacttcaggagtagggatggtaatgccaatctcttcttcaatttcacgaatagcacattgctcaaaggtttcccccggatcaacatggccaccaaaaattgaccaataaggagcgtgtttaccacagcgtttacctaataatacttcacctttttcattgacgatgatcactccaacaccaacgactacagacatgagagactccaaaatagcatacggataaaaaaatagaggcttgcgattttagtacatcaaatcgcaagtaaaaaagaaataaggttattgagtttgttgtgattttaaccaagctatttcttctggccaaatatcaggattaattgtttctaagataagtgggatcccatcaaaacggatatcttgcataatataagtaaagggtactttgccaatattgccttggcctaaactatgatggcgatcgacacgactagccaattcgcttttagcatcatttaagtgcatggcttttaaatattgaaagccgacaatattatcaaattcagcaaaggtcttttcacagtcttcaacggtacgtagatcataacctgcagcaaaagtgtgacaagtatcaatacaaacgcccactcgagatttatcttctacaccatcgataatagcggcgagatgttcaaaacgatagcctaagttagtgccttgtccagcggtattttcaatcactgcggtcacattttgggttttatctaaggtgatattaattgattcagcgatgcgttgcagacatttatcaacatcgattttttttaaatggctacctgggtgaaaattaagtaattcaatgcctaattgctcacagcgttgcatctcatcgagaaaagcggctcttgatttttcaagggcttcttcttctggatgccctaaattaatcagatagctgtcgtgtggtaaaatttgtgctggaccatagccatagatttcacaattttttttaaatttatcaatcgattcagttgataacggggctgctttccattggcgctgatttttagtaaaaagagcaaatgccgttgctttgatctcatgagctcgtaatacagcctgatcaacaccacctgcagcactgacatgtgcgccaacaaatttcatcatagttctcctctaatctcatttcacactacgataacaaatcgtgggcttattgacatctgaatatgaggaaatataaaaaagcgcaacttaaactagaataagttgcgcaatacggaggtacatactcaaggatagattaaacaatcaaatcaacacagattggataaagatattaatagcagcaccacctaacgttagccagaaaaagagaaataaagctagcagtagtggttttacacccgcttgacgtatcgcactaatatgcgttgttaaacctaatgccaccatcgccattgccaataaaatagtatcaatagtgacgatatggttcacaatagcggcaggaattaaattaaatgaattaaaaccagccattaagataaagaacacagcaaaccaaggaatagttatcggacttttttctgttgtcgcacctactgttttacggccctttttactaatataagtagaaaggataattaagaaaggtgccagcatcatcacgcggatcattttactaattacggccgcattttctgcatctggactaattgaatgacccaccgcaacaacttgagcgacttcatgtatggttgaaccagcgaagataccaaaagtttcttcactaaaaggtaaccaacccgcaaaagcgttaagatggaaaaaccatgggtagaggaaaataccgatagttccaaaaattacgacagtggatacagccaccgcaacttggctcgcctgagctttgacaacaggctctgttgccatgaccgcagccgcaccacaaatactactacccgcaccaattaacatgacggtttgatcatcaagaccaaaatattttttccccacccacattgcaatgagaaaagttgaggtcaacataatagcgtcaataattaatcctgttgcgcctacatctgcaatttgctgaaaagtgagtctaaatccgtataggatgatccccgcacgtagtaaatagtgtttagcaaacttaacgccttcatcactataaggtttagcgatgggataaaccgtattacccgcaataatgccaaataagatagccagtgtaagagcacctaaccccatactggaaaaccatggaatatcacctacgtaaatagcgagggcggttaatatacctgttagcagcaagccggggagccagcgataaacaggaataaaacattttttagccaatgtggttgtttgactttgctctgacatagaaaaaccttgctcatgtaaattttgcataagcatataacagatactattatttattaaattcattatttttataataataaccactaaaactaatataggtatattttcacaattgttcttggtatgttattggtttgtggatagtatgttattactatgacagctaaaaggtgggatggacatgcgtattacattgcgacaactggaagtatttactgaagtacttaaaagtggttctacaacacaggcttcacaacagttggcattatctcaatccgctgtgagtgcttctttaactgatctagaaaatcagttaggagtacaacttttcgatagagtggggaagcgcttagtgactaatgaacacgggcgattattatatccaagggcactctctttacttgagcgtgctactgaagtagagcagttatttcaagccggaaatggtgctttacgtattgctgcaagcaccactattggtaattatattttgccacaaatgttgggtaattttcatcgtaactaccccgatattccacttgaaatgagtattggcaatacggaagaagtcgtcaaatcagtcagtgagttccgtgttgatttaggccttattgaaggggcttgccaaagctctgaattgatcagccaaaaatggctactggatgaaatggtcatattttgttcccctgaacatcctttagctaaggcgaaaacagtgacattagccgatcttcaatccgcgccgtggatcctacgtgaaaacggttctgggacgcgagatgtactcaatcatctgctgtttgcttcattacccggatatcgaatcgaaatggaattaggtaattcagaagcgataaaacatgctgtaatgtatgaaatggggattagttgtttatctcgccgagtgatccaagatcaaatagagagtggctctttaaaagagataaaggtcgaaggtctaaaattacaacgtactttatatttggtctatcatcgccaaaaacatgtctctgatgccctcaaaaaattactttcatattgtaatgctgaacatttaatcgacaacgcttgataagttactaataattgaagcccgattatgaaggtatcttataatcctagatccttgctattcaccacagccagatttgttacaattgatgctaggaatatgaatataaccgtggaatgataatgtcagaacaacaaacagataccgcaaaatcgggtgcggtacgcactttgcgtcgagaattaaaggcgcgacatttagcgatgatcgctattggtggttcaattggtacagggctttttgtcgcatcaggtgcaactgttgctcaagcagggccagggggcgcattgctctcttacgcattaataggacttatggtctatttccttatgaccagccttggagagttagcggcatttatgcctgtttccggatctttttcaacctatggctctaaatatgttgatgaaggatttggtttcgcactaggctggaactactggtacaactgggctgtgacgattgcagttgacttagtcgccgcgcagctcgtgatgctgtattggttccctgatgtggatggttggatttggagtgcgttatttttagccgttattttcttgcttaactatatttctgtaaagggatttggtgaagctgaatattggttttcattaattaaagtatcgaccgtgattatttttattgcggtgggtattgcgatgatcaccggtattatgaaaggtgctgaaaatgcaggttggcacaactgggaaatcggcgatgcgccttttgctggtggttttgccgctatgataggggtagcgatgattgttgggttctctttccaaggaactgaacttatcggtatcgcagcgggggagtcgaaagatcctgcgaaaaatattcctaaagcagtacgtaaagttttttggcgtattttactgttttatatcctagctatcttaattatcagtttaatcattccttataccgatcctaacttgctacgtaatgatgtgggtgacatcagtgtgagtccgtttacactggtatttaaaaatgcagggttactttcagctgccgctatcatgaacgcagttattttaacggcggtgctttcggcagggaactccggtatgtatgcatctacgcgtatgttatttaccttagcaagagaaggtaaagcgccgaaattttttggtaaattatccaaaaacggtgttccacgtaatgcactttatgcaacaacagtggttgcgggtttatgctttttaagctcaatgtatggtaaccaaacggtttatttatggttattaaatacatcaggtatgacaggatttattgcttggttaggtattgcaatcagtcattaccgttttcgtcggggttatgtagcacaaggtcgtgatctgaatgaattgccatatcgttcaggcttcttccctgtaggacctatttttgcctttattctctgtttaattattacattaggtcaaaactatcaggcatttttagaagatactattgactggtatggtgttgtggcaacctatattgggatcccattattcctgctgatttggtttacctataaaatagtgaagaaaacacgttttattcgctacagtgaaatgcagtttcctgagcatattgaaaacaaaaaatagttagttttatcactaaatagagagccggctaatttgtgaactttatcacaatttagccggctctttttctattctatgactaataattacacaaataagagaaaattctaatttatattcgcaatcgcattgataagtattcttatttgctttattgttagcaaacaatttattgcataataatgtgacgacagtgttattggttatagaaaatagatctgatgtatgtaaagcgtcatcatccactctctagagcgatttttagctcatctaataacgcatcgttgtataagaagtcatatattgaatatcgcgtattatatcaattaagcgaattttcctcttatttgtcacattattctcaattaatcaattttaatgcaaaaaagtgatgaataaattatcaggttaaactttggcatatttatctgttaatgaaacagctggatagaaaatcaatagcaatatgcaaatagatgtaggtatatatttgtttgattaatctacagacaagcctgataaatatattgtcactattaataggattttattaacacattgttttaaaagaaaatttatatgtcaaattacttgaatgataaaaatattatagaagcataaaacaataacagcagaagtataggaatttagtcaatagggatataaaaataatatcaaaataactaagggtaattaaattaattaccttcattgttgagcaactgtcgatctgtccatctatataaaacttaaagaatatatattcttggagaatcgggaatggtagtgttaaagaaaaataaaattgcgcttggcgttgttgctgctcttgcatcaagttttgtgatgacagcttccgcagaagatcctgaaaggttactggtgacaaccgcttcgggatttaaacagactgttgaagatgctccagcttctgtttcagttgtaactcgtgaacaattagaaacaaaatcatatcgtgatgtgactgatgcgctaaaagatgttccgggggtgctagtgacggggggcggtagcagctctgatattagtattcgtggtatggatcctaagtataccatgatcttagtcgatggtaagcgtgttgcatctcgtgaaacgcgtcctaatagtgataactcaggtattgaacaaggttggttacctcctttacccgcgattgagcgtattgaggtagtaagaggcccaatgtcttctttatatggctctgatgccatgggaggcgttatcaatattattacgcgtaaagcgcaaaaagaatggaactttagtttacgtggtgacacaacgttgactgagcgtaaaaatgaaggaaatacaggacaaggtagtttctatgctgcaggtccattgattgataatgtgttaggtctaaagctgcaagggcaatattctcaccgtggtgaagatagacgtgttgatggctataaccgtcagatcacggcaagtggtggcggtacattaagctggacaccagatgagaaaaataccgttgaatttgaatttaaaaaagataatcaacatcgtgattcacgtgttggctattcaaaatcagctgaacttgttaaaggaaaggcaccacaaagtagctttactgattatgagctaacgcattatgctttaacccatgatggtatttatgattttggtactatgaatacctatgttcagcgcgatgaaagccgcaatccatcacgtaaaatggattatgatgatacaactgttcgtaaccaaaccgtctttatgtttggtgatcatatgttaagtgtcggcggtcaatatcgctatgaagagctgaaagatgaaggcaataagcttaaaggtaataataagctagatcgctatagttgggcgctgtttgctgaagatgagtggacattgacaaacgacttcgctttaaccgccggtttacggatggataaagatgaaaactttggtactcactggacaccgcgagtttatggtgtttggcatttagctgatgaatggacattaaaaggtggggtatctactggatatcgttcaccggatttacgtcaagcgacagccacttggggacaagctacaggcggtggtcgttatgatgcggttatttacggtaatcctgatttaaaaccagaaaaatcggtgacagaagaaattggtattatttgggataatcgagataatttaaatgcaagtattacgatttataatactgattttaaagataaaataatggaaaggcgcgtttgtgacaaagactcatctaaaccatgtaaagcgagtgatggatttggacatgtttatgattttgtgagtactcgtgaaaatgttgataaagccaatatgcgcggtgttgaagttactgctaactggattatttccccagaatggaatttagcagcaaactacacgttcacagatacggaacaaaagagtggcgatttcaaaggtaagcctctgaataagcaaccgcgccatatggcaaacgcgaccttaaattgggaaaccacacctgaaatggaaacttgggcacgcattaatttccgtggtaagacatcagactatttatcacgtacttcaatggctaagagcacaccttcatacgcctttgttgatgtaggtactagctatagtctaacgaagcaactaaatctgatcggtggcgtctataatgtttttgatcgtcgcatcgaaagagataattacggttcaaccttagaaggccgtcgttataacatcggattaaactacaacttctagttttatccctcagtgtgtgtcaatcaagctccacattatgtggagctttttttgttatttaattaaagccaatactggcaaaatgcataataggcatttatatttagtttaatgaatcacctaaaaataaggttcatttgttttaaccactgactatctttactgaatacttaatctttttttcttattactgaaaatcatttttgattactctatatggcttgttgaaaaataatggtatttcagttggctgtatcttttttagtctttatagcgtgaaataagcaattaatttacattagatttatttatgcattattaatactttattttggttggtattgttgtatataacatgcagaattaattaactttttgattgttaatgtgttaatgatttttgttgtttaataccaaacgacaataggctatatctcaaagttaggctttgtgataaaaacgcaaatattgtcaatgaaatgtgacagtaaaggctaacttagtttgctatttaaaaagatcgtaaaaaaaggtggttttttgatgaaaatctattgctatttaagtctgagacgtgcaaaatgcgcccactaaaaatatgactgatgcgttttaactgcatcggtttttttttgctttttacttattactacaccaagaggtcagacttattttagtctgaatagataacataatttgattagcagccagccccttagagaaagggttgtcgtgatagaggaatgctaatatggtacaattattccctttcgcagtcgggcctaacggcacctgcggtaatgatgactacggagcacggcgtctcctaaactcactcctgtcctcaaaaacttctttctattctgtttatagacagatgcgaagtcttcccagtaactgtcggttgagtttatcaagtactcagttcgaagttatgggagggttcgctcatgtcagataatgtcatctcctctatcggcaccaatcaaactggtgttaataaccgtgttcaattacgcaaaacattgacgctaatgcaagtcgtcatgatggggttggcatttttacaacctatgacgatttttgatactttcggtattgtatcaggtataaccaatggtcatgtggcaacatcatatgctattgcgttaaccgctattttatttaccgcagtgagctacgggaaattagtcaagcgtttcccttcagcaggctctgcttatacttatgcacaaaaatccatgagtccacatgttggttttatggttgggtggtcttcattattagactacttatttatgccaatgataaatatcttattggctaaaatttatttacaagccatattcccaggcgttgatccgtggatctttgttgttgcgttagtcgcgttaatgacattttttaatctacgcggaattaacgttgtggctaacttaaataccgttattgttgttattcaagtagctgtaatggtggtatttgttggtttattaattcatggcgtatataacggcgaaggtacaggggagttatggactttccgcccatttgcgtcagtagatgctgaattaatcccaatgataaccggcgcgacaattttgtgcttctcgttcttagggtttgatggcattagtaccttatctgaagaaacacccaatgccggtaatgtgataccaaaagcgattttcttaactgcgttaatcggtggtttaatttttatcgctgtttcttattttttacaattatatttcccagatatttcacgttttaaaaatccagaagagtcacaacctgagattatgctgtatgtagcaggagccttgttccagtctattatcttagtgttttcttgtgtgacggtattagcatcgggtatggcggctcacgcaggtgttgcgcgtctgctgtatgtgatgggacgtgatggtgtattccctgaaaaagcgtttggttatgttcatcccaaatggcgtacaccggcatttaacgtactgttagttggctttttagcgctaggggcgatcttttttgatttagtcactgctacagcgttaattaactttggtgcgttagtggcatttacctttgtcaatttatctgttatttcgcagttctacattcgtgagcgtcgtaataaagggttaatggatcatattaactatcttatattaccgattattggtgccgcgacaatgggggtactgtgggtaaaccttgaaccaggctctatggaattaggactgatttggggggcaattggtatactttatatggtgtggatcactcgtcgattccgtcgacctatgcctcaaatgccagagaaataacattgtatttagtatgttgattatttaaaaatggcctcattagtgaggccattttttgtttatagttagaacgcgatagagagtttcatatcaataccattatcgtgctgatttcttgccgttagtccgctgtatccaattgagacttttgatgtctcattaatttggatagtcgttccagcttttaccaccagtgcatctcgagcagcatcaacactatttgctataaatgtaggctgggtttgtgtgaaacgtaaatggatccctcgttctacatcgttatattggtgtctccagcctagctcaccatagagagaaccccttgatttactgttaaatttccattggttatttaaacgtagccctgtagtggaggtggttgactctagagtttgcgaatgggcttgtaaggctgctcgtccaccttgctcgttaatggtggcgttttttgttttggcatattcaaaattaacaaaaggctctaattgtgtatcagagagggtgatgggataagctgcttcaataaaaatttggctagtgttcccattgtaattcgccttatttttatctgactgtacaccatagttgaccgattttgttgtatggatacgatgaaaggtattagatgcaccagcacgtaacacgattgtgtcaaaatcatagccaccatagagtgataagtggtaattttcgctatttgcgtgactgttatcaccagatagtgaggttttggtgacccctgttgcaataccaagcagcattttatcgtgactaacccgctgatctgcacctaatagtacgccataggtggaagcatcatagctatttgcattgccatcattggaagtcttttcccaattagagagaattttagcccaaacatgacctttgttacctgcactttctttctctctattaattatttctgcatttttaatctgagagaggagtgtttcttttatttgccggctattgttgagttggttagataagatatccgcatgaatttgacctgttaattgattataggcagagcgggcatcattccctgtatccattcttataatgctttcataaataggatgtcccaagggtaatgcgtctatcgcattggcgattgatagttggttttttgttttagccacacttgaaaaggcggtgttatttcttccgacatttagtattactgaatttttatcgtaggacagtgtggtacctaaaaaaagatagtttggatttacatcagtaaattgaccattaacaccgtgatctgccgttaaaatggtatattttgtgttatataaactttgaacatcatcttttgttagcagattttggctattttcaagcgatacattaaccattccaccattcagtgtcgcggtacccaaactgattattttatcgctatcaccttgtgaatttatttcaacatggtagttgctaccagaattaaaaataacagtatcatctatattaattgtacctattgaatgacccggtgatacgatgcctcctgaataaacggccagcttattaatttttcctttaccagaaagtatccctttgttattgatattgacttgagaatcaacgctcccaccatttaatagcaatgctcctttgttgacatctagtaaagtgtttagtgttccttcaagaagcaatgtaccaccattaatggaagaattttttgcatagtggttttcaccagtgagcagtaaatgaccctgattaacttcaatgccagcaaaatggttattgcctgataagatcaaggtgccattaccttgtttgattaatttgccaggcccactaatatcatttttccattcatcaagttgaccaaattcagcaaagtcaaattcattagttatttgattaacaataaaatgattgtagaaataactagggccattataggctttcgggagattaattaatccccaattggcgtttggatcatctttgtttgcagcccagccagccaatgaattactcgggtaggtggtactcgctaagatagattgtcgttgctctctggttaaataggcaaagcgtaaacgcagtaaagcgttggcagatgttggtatttcattaggggtaatgcgtggtgcaggttctggatctttggttgcgtaataacctgtttcatcgttagtgattgttgtcgaggtcgttaagcaatgtggatttttgcattggctagcaacattttggcggacttctttggcaagctctacaaaagtgcgggtggtgtcatcatctgcaagcatttgtgacagcaggtaataattgcctattctggatgcaatggtatctgttgcgaagtgtgccccgacaataactcgactttcaccatattctattgctctggcaaacatttcactgcccttttcagggaataagatggataacactgcagcttgtttgtatccgttccacgtatgaccactgggataagatgagcctgttatagtggtgtagttatcaagataatgaccttctttatcaagtacttgataaggtcggccacgtaaaaaaagttcttttaagataaaatctatcgagcgtactctttttttgtttgtatcataagcataggtgcctgtgctatgtaatttattgagatcttgataagcttgaatatcgctaaagttgatcgatctagccttatcaccaaataaaatattagcataggtattaaacacataagtatgagactgtgacttatctgcttcggcaagttctctacgttcgccggtaatggcttgataattattgctgattattctatctaattcggcggttctcgatcctttttgagggctagttgtgataacaccatttttgatctcatctaaccaataattacgttggtcgataattcgttgtttggtttgtgaaatattggtttcagaccatgttgaatgggaaaaaagtaaaaaaaagcagcttaacgaggtaggtattacgatatttttcataaaataagccataatctctaaaaaattgagagctaatttatattagcaatgtttaatttttatgacaggcattattatattagagatattttctaaattgttttgcagtaatttattcagcgttttttttattatttttactaacattatatgatagtttgaatatagtgtgatcaatgtagtaaaaaatatcggtatattctctatattaaaaataaaaattagagtatgccgatgatttaaattataccttatttattaagcaaattagctaagctttatctattttgtactgttaaatgcttaattagttattctacttattcattttagaatgaatataatgaactttttgattcttttaatttttgcgctaattcagaggcctcatatcgctctgtgactatctcaatataagatgcgctatttgttagtgcggctttatttaacgcattatctagtccacttgctgtagttactttttcactataccaatctgttgcaccaaaggcttgcggtaactgatgatagttccactgagctaaatcattataataagcttcggggtaatcacataataatctctctattaaataaccatcgttatttaatactagaataataggttttaaaccgaaacgaacaaattgactaatttcttgtactgttaattgatgagagccttcaccggtaattaaaataatgcgtttttctggtgccgctaatgcagcgcctaatgcagccggtgttgcccaaccaatagagccccatagtgtttggttatgaaattgtgcaccttcaggtaataaagcgaagcctaatcccatggatgaggttcctgtttctgcaataataatatcattaggcttaaagaatttttctaaacgaggatagagatattgtgctgtaattttatcattatcagatgcaaccgcttcacctaatcctttcgctgttattttatgataagttttatttggtagtcgttgggttaattcagaaagaatatctgtcatataaacgcaggagtagatcacagaatcaatttcaacatagtctggcatgatactgataaattgttctgatttcatattagcagtgaaactgcctgtattaaagtcagtcagtaatgtaccgatccctaatatatattcactactttcaacaaattctctgacctctggtgtcattaattgtccgtcatacataccaacatattgcgcgttagattcacttaatatgcttttatccataaacatagtggcataaggtaaacctgttttatcaataaaatgctggattttatctgttaaccctaaacgtgcagataaaaagcctggtaatacacagacattattgctgtgggtgagtttctcaatgattgctgatactgctttttctaatgttgctttatcacttgttggcttttgtggtgcggtaacagataacggcgctactacttggctattagcataatctgaaggtataccaatataaacaggacgacgctcttttaatgccacatctattacgcgctccatttcttccacacaattttcgggtgttaaaatagtatgagcgcaagcaaggcgctgagcaatctgataaaaaacatcaaaatcaccattacctaaagtatgatgcacaaggcgtttacttttttgtacgccacttgctggcatgccaactaaatggaaaatcggtaaattttcagcataggcaccggcaatagcgttaatcgcacttaattcacctacgccaaaggtagtggataatgctgccatacctttaattcgggcatagccatctgcagcatatgccgcatttaattcattacagttaccaatccaacgttgttgttggttgttgcaaacagtgtcttcaatagggaaggcgtaatcaccagcaacaccaaaaatatctttgatacctaaatcatataatcggtctaaaacgtacttaataactgtgtttgtcatataatctccagaaaatctgaaataataatctactaaatgatagtaaagttcttacattatgcttaatgttctatcgctaattttgtttttaaggaaatggtttattattattgggggtataaccaaaagtaataaggtaaaaattatttatggatattcgtgttttacgctattttattgaagttgttcaattaaatggatttagccgagccgctgatgctttatttattacacaaccagccattagtcgtagcattaaaaaattagaggatgaattaggcactgttttattaataagagaagtggatggggtaaaattaactgatgacggtgctattttatatgagcatgcaaagcagatcctcgctcaatttaatagtatgaataaagcattaaatgataaagatgaacctttaacaggcgccttaaatgtcggattacctcctgttatagcctcaacctattttgctgatattatcatggcgtttagctctcgccatcccaatgttgaacttaaaatttttgagctgggcaccaaacagatggaagatgcgatgttagaaggcacggtagaaactgcggcagtgatgttaccttttaatgataaagattttgaattaaccattttttcagaagatcacttgatgttattagtagcacaatcccatcctttggctaaagataagaaggttaattttaaacagcttattacagagcggtttatctttttttcagaagattttcgtattaatgatttggtacgtagtgcttgtgggatttataacactgaaccacaaattgtggggagaagtaatcatttagatttaattattgcaatggttaaagccggtgtcgggatcacactgttgcctaatagcatgtgtaataaatatcctatcgatgatttagtggttattcccattacttcccctaggttatcttatcaattagctttagccaccaatcaaaatagttaccaaagccgtagttgccaagcatggaataaattagcaatagagaaattaatgaaagagaatatttaatcatggaatgataaatacgctttgtaaaaagcgttttattaatggtagctataattattttatcaaactagtggctaatttattgtgattaacttgctcacaatggtataaaagtggttatattgataatacatttctttttatctcattatttttaaataaaaattaaactgtgataaatagaaaaatcagacaagacaggaataggatagggacaatgaatgagagtagcagctccacaaaccagcattttattcgtaagttagaaggtattgtcggtaaaaaacatgtattaacccaagagcataaaacagagcgatatcgtaaagggtttcgttccggacagggaaaagcgctggcagtggtattccccggctctttattagaacagtggcgtatttttaaaacctgtgttgaagccgataaaattattattatgcaagcggcaaatactgggttaacagaaggttcaacccccagtggtgatgactatgatcgtgatattgttatcatcagtaccttgcgccaagataaaatacaagttctttctgaatataaccaagttattgcctttcctggcagtacattatggcacttagaaaaagtattaaagccattaggaagagagccacattcagtgatagggtcttcttgtattggtgcttcggtgattggaggcatttgtaataactcagggggggcattagtgcgccgcggtcctgcttatactgagttatctctttatgcccgtgttaatgaacaaggtgaagcagagcttatcaaccatttgggaattgatttaggtgacactccggaagagatattaaccaatctggataatcgacattatcatgcgaaacaaattcatgcgacggataaactggcatctgatcatgaatatagtgagcgagtacgtgatattgatgcagatacaccatctcgatttaataatgacgaaagacgtctctttgaagcggcgggaagcgccggtaagctctctgtttttgccgtgagattagatactttccctgctgatcatcgcacacaagttttctatattgggaccaatgatcctgatgagttagaagatatccgtcgccatattctcagtcaatttaaggtattacccgttgcgggtgagtatatgcatcgaagttactacaagatggcagaagtttatggcaaagatacttttttaattattgataagttaggtacagataagatgccagcattatttgctattaaagggcgtgttgatgctgttcttaataaagtgccatttttacctaagaatctaactgatagaacaatgcaattgatgagtaagttatggcctgctcatttacctgctcgtatgacagaatatcgcgataaatatgagcatcatttaatgctaagaatggcggatagtggtatagaagaagcctcaacttatttaaaagaatattttaaacatgccacgggggattatttcgaatgtacagaagaagaaggtaataaagcctttttacatcgttttgccgccgcgggtgctgcggtgcgttatcatgccgttcatattaacgatgtggaagatgtgctacctttggatattgcattgcgtcgtaatgatcgagattggtttgaaaaactgcctcctgaaatagaaaaccaattgctctataaattgtactgtggtcactttatgtgtcacgttatgcatcaagattatattattaaaaaaggtgttgacgctaaggcgcttaaagcacagatgttagccttactagacaaacgtggtgcggaatatccagcagagcataatgtagggcatctctattatgcaaaaccgcaattaaaagcgttttataaacataacgatccgacaaatagcatgaacccaggcattggtaaaacctcaaaattaaaatattggggagaagagtgtggttgcgggcataatcataatcaagctgaagttaatcatatagaaaacaaagaataagttttttattctctgacagctaaatataataaaggcagggaaacctgccttttgcgtaatttaattgcttatctgatgttattaactcgcaatttcttgagcatataaatatagctcttgcagttgttttagcttttcttcgttatcgctatgttcttctgctaacagctgaatggtattgatatattcagtcagcttttctggcgttaattgctcttttctatgcgctaaccaacgttgttgttcatcataagttaatgtggctgggaagtttctcgcacggtaacggaaaaacagcggctccatacgtggatcttcaaaagttaaattaagtgctggtaagttttgtggctgtgttgagcgaataatttccatcgcgctacgatcattatcgctaaaaaagccattgtataattgagcatcaacatcatctgcaggggtaaatggtgtttgctgagcaaaaatctcgacgactttattgcggatctcaggattagacagcaatattgcttggttatttaaacaattatcaatatctaatccaattctatcggcatcttgagatctgagggtatttttaggtgcaacgatagggcatttattaatatgcagtaattttatcggaactggtggctcatcggcagataactcactgcgaggagtatataagcgctcacgcaattgctctgaagtgagggttaataaaggggaaatatccgcagctaaatcacaaacaatcaccgcattacgattatctggatgccaagctaaaggagctacaaggcttaaattagaacgcgctgcaccaaacataccagaaacatgcacaagcggcgtcatggttgggatatctatcagtgcttgtactttacgtttatcacgtaaattaaagaaataatcaaacatacgaggttgcgcttgtttgagtttttttgccatcgcaatagttgcataaacgtctgacatggcatcatgcgcattttcgtgggagatcccatttgctttagttaatagctcaaggcgaaaactcggaaagccatcatcattctcaggccaattaattccctcaggacgcaatgcataacatgcacgtaaaacatcaagtaaatcccaacgtgaatttcctttttgccaactataggcatagggatcataaaaattacggtataagatatttctggtgacttcatcatcaaagcgtaaattgttataacccataatacaactgttaggctggctaaaggcttgatgaatttggcgagtaaattcagcttctgatacaccatgctttagtgctatttgtggtgtgatccccgttatcatgacggcttctggctgaggtaagtaatcatcattcggtttgcaataaatgaccagaggatcttcaatgatattaaaatccatatctgttctgacaccggcaaattgcgcagggcgatccatcgcaggatgcgtaccaaaggtctcgtagtcatggatatagaaagtgggggtattagctgaatttgacaaggtttcctaccgtaatttatctgcttaattaattgatttttaaatgagttttaaagcattaaaccttgcactattgagttgcatcgggtttaaacaatggatataacgacaaagtttgattgatgatagtgtcacaaatatcaaattgttaacaatgcttaactgcgataaaaggtatggtaaaccatattgactaaaacgtgaaatatctaatgaataagaaataaaaggagcatagcgttgagtatagggagaacctcgtttaatggggatatacaaatagcgatctatcgcacataacttatatgttaacgttaactttagtgcgttaaatcacataatggtaaatattttctacgttataaatagagttaacgttaacattctggtcgcaaaatgactttataaggcgcttaacaatgaataaagatgctaaaaaatactatgtgatcttaagtgcgttgctatttttcttcttttttacatggtcttcatcgttttcattaatctctatttggttacatcaatatgttggacttaaagcaacagatactggtttgatattctcggctatatcattgattgctttatgtgcccagccactctatggctttattcaagataaactgggtttacgcaaaaatttactgctggttatcgcggtattgcttattttatcggggcctttttttcttagctttgcggcaatattgcgctggaatatttttattggctctattctcggagggctctatgtaggaatgacttttaatgccgggatcggcgttttagaatcttatactgagcgtgttagccgtattcgtggttttgagtatggcagggcgaggatgtggggctctttgggatgggcatcggcaacttttattgctgggcataatatcaatatcgatcctaactataacttttttatggcatcgatagcgggggtgatcttcttaattctgttggcgttactaaaaacagataaaccagatgcttttaatcaattagagcatggtaaaccttctgcactcaccatcaatgatgcattaaacttactgtcattaccgcgcttttgggcattaatattatttgtggtcggaacctgtatttatagcgtctacgatcaacagttcccggttttcttctcttcacaatttgcatcattacagcaaggtaatgagatgtacgggtatcttaattccttacaggttttcttagaagcgggaggaatgtttgttgcgcctttcttagtgaacaaaataggggcgaaaaacggtttattattggcgagtagtgtgatggctgcgcgtattattggttctggattagttgaagggccgataatgatctcttgtatgaagttattacatgccgttgagcttcctatcctgttaatttctatttttaaatataacagccaacattttgataagcgtttatcttctacattgtatttagtcggtttccaatgtgtcagttccattgtggcaacattgttatccccattagcgggttatggctatgatcattacggttttgcccctacgtatatggtgatgggatgtatggtagtcggtactacgttactttctgctgtgttgttacgtgctgactcgaaagcattaccacaacatgatatgactgatctcgatagtaacaataaagctcaaccgatttaagcgggtaggcattagctattacagcgctgctagataatttttatggctaccattcgtgagtggtagctttttttatcgattttatttaggtttacgaatatcggctgattgactatattgaatagagcgtatcattctaatctactgtttattaagccaaatcaattaaatttataaactttacttgtttattgacacgattaagcgataatcttaaacagtactatttttcttaaatatcaattgtaaaggtgtaggaaatggataacgcaagcaagccgtctttccaaaacgtactggagtttgtgcgtatgtatcgtcgtaaaaacaaaatccgtcgtgagatcactgacaatgagaaaaagatccgtgataaccaaaaacgtgttcttttattagacaacttaagtgaatacattaagcctggtatgtcaattgaagatgtactcggtattatcgctaatatgcgtagtgactatgaagatcgtgtagatgattacatcataaaaaatgcagatctctctaaagagcgtcgtgaattgtcaaaacaattaaaagcgatgggtgaaattaaaaatattcctaatattaaaaattaattatattagctggcaaatccaaaggcctctgaatggttgttcagaggccttttttttcgttttttcatcatagttatggtcacacaagccataaaacaaaagagcctgctaattaacaggctcttggattaacaacggatattttatcgcgttatattattgcttcttttctcttatgactcactatgcgttgacgctttagtcatttcagatgaagcatgattagttgaacaatgaccacccgcaccgctacggccttgcttatcaaaggctggacgtgcatcccatgctttgatttcaattgctacaggcgcatctgtagatgccggagctttcgtcattggcgagctggcatgtaactggcgtactgttggctcttgacgaataacggtcactttagctggctgcttaacttcaaccgatacgacttcggtttccgttttagtttcagcaacaggctcggtcacttcaggctgtgtttctacaggcgtagattgagaagcagtttgctctacatgctgctcagccgcacattcagttgatgcttgggttgttgctggcatctcaggtacaggcgcttgcgttgtcatgtcactatgggtgtcttcactagcggtttcatgatcagcattagctatgactttattatgagtggtttctgttttctcttcggcaacatctgcttgctcagtcacttcatgtagataagcttccgttgtatttaataccgcagagatattctctttacgagtaacatgctcttgggtattaacgtcagcaataacgttgttaacagcgttttcttctacatgatcggcagttgactcattaacatcagcagtcgtttcttgcggtgcaatcgcgacaatttcagctacagcttcagtggttgattcagtactaactgtgaccgaataagtcgcttcagttgcttcagtatttgctgtttgagcctgagcaacatctgcagcaatggtttctgatacttctggtgcaatagcaaccatttgtggatctttatgagtaatgaagtttttagcaactgtattgtcagtgctattttcaacattattgtcaacaaatggtgcatcactaattggtgtgacagggtaatgaatacatactttacctgacgcaagctctggagaagctacggccatcgttagcggcataggggagactaatgtacgttcatcacgataacggcgacgacgttgcccactaacacgtaaatgacgaggtgaacggcgagagcgacgtggcatcacattttcttgttggcccgcattctcttcttttttcacttcttcttgtgcttttacagtatcagttaacgcattagcagaaacttgttcttgctcatctttaaccgtcgctactggtttcgcaacttgctgtttttctgatgatggtaattgactaaccactgtcgctggtggctcagaaaccggtgagtcgctcacagcaacatcaatagcgggtgttgcgacagcatcagtaacacgaacagattgcgttaattgacggcgagcacgacgaggcataacagggcgacgaggttcttctttcttctcagcctgttttgctgcattgtcattttccgctgtattttgtgcggctttcgcagcttcttgttgttgctgacgtttttcttcctgacgacgacgttgttctgcacgttgttcacggcgttgttgacgacgggcttcacgttcagcgatttcttgctcattactgacttcagtattggcattttgcgctttctgattacggttcttacgattttcttcgctcgttacgttatcgcgattgcgctcgtggtcacgattgcgatcattatcgcgttcacggcggttattattgcgacgattgttattatttcggcgctcacgacggttttcattattctcttttttgctttcttgcggtttttcttcaacgacaggctctggctgactcgcaaataagttagagaagaattttgcaatagcactaaagaatccaccactctctgttgtttcgcttttcttcacctgtttagctggagttggtgcagattttttcttattggtggtgtcagcgctattatcttgtaatgcaaaagcggatatcgccggttgctctggcgctttacgctcaggtacggcttcatcttctgcttcatttaactgagtttcgtgatattgcgctaaattgtagcttaatgaagagatctcttcgcccttgcgcacacgaataactgagaaatgcggtgtttgcatttgatcattaggaacaatcactactttgacattggcttggcgcaactcaatatcggtgacggccttacgtttttcattgagcaagtaagaggcaatttgtacgggcacaatagcgtgtacttcatgagtattttcttttaatgcttcttcttcgataagacgcaatacagaaagagaaagtgactcattatcacggatagtcccggtgcctaaacaacgcggacaaacatgatggcttgattcacctaatgaaggacttaaacgctgacgtgacatctctaataagccgaaacgcgaaatgcgacctatttgaatacgtgcgcgatcttggcgcacagcctcacgcattctattttccacttcacgctgatgacgaacaggggtcatatcgataaagtcgataacaatcaaaccaccaaggtcacgtagacggagttggcgcgcaatttcatcagcagcttctaagttagtgttaaaggctgtctcttcaatatcgccacctcgtgttgaacgagatgagttaatatcgatagcggttaatgcttctgttgtatcaataaccagagcgccacccgaaggtaaacggacttcacgttggaaggctgattcaatttgagattcaatttggtagtgactaaatagtggtacagcccctgtgtagtggcgaattttgctagcaaagtcaccacgaccaatggcttcaatatggctacgagccatttcaactactttagcgttatcaattaagatctcaccaatatctggtcgtaaataatcacggaaagcacgtacaatcacgttactttcttggtggatcagaaaaggagcagggcggctttccgctgcttttttgatagcatcccaatgtcttaaacggtagcttaaatcttgttgtaatgcttctgcggatttacccacacctgcagtacgaacaattaatcccattccatcaggaatatcaaggctagataatgcttcctttaattcagtgcgatcttccccttcaatacgacgagaaataccgccagcacgagggttatttggcattaataccaaatagctacctgcaaggctaataaaggtggttaaagctgcacctttatttccgcgctcttctttatctacctgtacgattacctcttgaccttcttttaaaacatctttgatgttaggacgaccatgtgagtgataattactagggaaatattcgcgggcaatttctttgataggaaggaaaccgtggcgttccgcaccataatcaacaaaagcggcttctagactgggttcaattcgggtgattttacctttatagatattggcttttttttgctcatgtccggggctttcgatatccagatcatacaaacgttgcccatcaacaagggcaacacgcaactcttcctgttgagtcgcgttaattaacattcttttcatattgtgacttactcgttattttcacgttttataatgtgccactgacatacgtaattacactattgataaccgatgacctcgtgtcttttacaaaggcgtcaacctcacggttgtcgattgtatagaggtgcaatttgtcggtgagtctgattttcagttctaaaattcagcactctttaattgagacgtaatgtgccaactcaataagtgatgtatttatggcatactaaattgtttgatattcgactatgtcttacgccattgctgcatttgaatatcaaacaaacaaaatttcataaatatacctgataaacttaatcaggagagtctgcattattccattggtgttggggttatagcaagatgacttttccgctttggtgactttttctgtataaatatgagagattagttaatgtttcgtctttttcccattaatcaggttaaaataggcacccaatttgatgttattttgtgcaccaataatttgtttgtcattttttattttaagagagctaaaaaatcgccactatgaaatcatttaatcaagttcagttcgtcaccattgatggcgatgaagcaggccagcgtattgataattttttactggcacgcttaaaaggtgtaccgaaaagtatgatttaccgaattatccgcaaaggtgaagttcgggttaataaagggcgcattaagcctgaatataaattagctgcaggggatagcattcgtattcctcctgtccgggtagcagaaaaagaagaacatgcggtatcgcctaagttagaaaaagtatcagcacttgctgagtgtattttatatgaagatgaacatgtgatgctgattaataagccatcagggacggcagtacatggtggtagcggactcagttttggtgtgattgaaggtttaagggcattgcgcccagaagcgagatttctagaattagtgcatcgccttgatagagatacctcaggggtattgttgattgctaaaaagcgctcagccctgcgttcactacacgaacagctaagattaaaacagatgcaaaaagattatttagccttagtacgtggtcaatggcaatctcatacaaaagtagtacaagcccctttattgaaaaatatcctacaaagtggtgagcgggtggttaaagtaagtagtgaaggtaaaccatcagaaacacgctttaaggtagaagagcgctttgaatttgcgaccttagttaaagcaagtcctgtcacgggacgaactcatcaaattcgtgtccatacattacatgccggccatcctattgcttttgatgatcgctatggtgatcgtgattttgatacacaattagcttcaaccaagcttaatcgtctctttttacatgcgagttcattaacctttattcatccctcaacaggggaaaaaatgcgtattgaagcgccgatggataaaacgttacgttactgtttacaagtattacgcaatcaaaaatcttaatactactgttttcaaactagcaaagtgggagaaaattttttcccactttgtttgcaaatgatttaccgttgtcgtcctagaaaataggatcagtatccagccaaggttatttggtgatggttgatatacattgctcaacaattttatcgatattccactctttcggtagcgatttagagccgtcttttctcatttccatatcaacacgaataaattcggtcataccataatctttgatgatgttgtcgtaagtacagctacaaacttcggtaatttgtggtattagtgcatcatcagtcacaccagaaccgagtatgcaactactaataaagttctttttaaatgaagatgcactttcatcttcttttttgggatcagtattttgggcaacattactactgttgtctgcttttacggctgaattgtcaggtgctttctcatcagagcaacctactaccgatgccgtaaggattaaagctgccaaaattgatgctaatttattcataatacgctttatcgctaaataagattaaaataagacaatcacgactattcctgattatctgtggaaagtaatgggttaattctttgtgagagtaacattttattcaatcggataagtggtaatccgattaaagaatttgggtcatcaccgcttaatttatcgaacagagtaattcctaacccctcagatttgaaacttcctgcgcaataaaacggcgtttctttatttaaatagccgataatttcatcatcggttaaatgccgaaagtgaacttgaaataattcacaatgactttcataggctaatgttgagctattatataaagttaatccagtataaaatgatacacattgaccggatgcttgttttaattgtgcaaaagcgttttcaaagttaaggggcttacccgtaatttttttattgagtacacaaacctgatctgaaccaataattaagtgatttgggtattgtacctctaaagcacgcgctttttcataggataaacgagtgactaacgcttgtgcacactctgtgggcaaaggggtttcgtcaatgtttggggaggcctgtataaagggcattccaagctttttcagaagctgagctcggaagggcgaagtcgacgcaagaaccagtggcaacatattttttataaaatccgtagcaaaatgatgcccgacattctaaactatgcgccgctgataaagcgaattttggtggaaaggtgtagataacccgcctttttctttgactatattccattacaaagataatatgcgcgccttatgcaaaaggtaaaattacccctgaccattgatgcgctgcgagcagcacagaagaatttagactatgacggtcaatattcctctgagcaagttagccgcttagctgaatcggtggtcagtgtggacagtaatattgatgtggctttatcatttgatattgaccatcaacgtttggcagtcatcaaggggcattccgatgtggatgtcactttagagtgtcaacgttgcgggggccattttccctatcatgttcacacaacatattgttttagccctgttgttagtgatgaacgggctgaagcattaccggaagaatatgagccaatcgacgtagacgattttggtgaaatagatttgctggcgatgattgaagatgaaataatcctcaacttgccggtggttccggtacatgattttgaacactgtgaagtgtccgacgcggaacaagtgttcggtgaactccctgaagaattatcagagaagccgaatccatttgccgtattagccagtttaaagaaaagtactaaggagtaaggtcaatggccgtacaacaaaacaaaccaactcgttctaaacgtggtatgcgtcgttctcatgacgcactgacagcaactcatgtttctgttgacaaaacttctggtgaaactcacctgcgtcaccatgtaactgctgacggttactaccgtggccgcaaggttatcaacaagtaattagctttatagctcgttgatactttgacaaatctaaccatagcgttagatgcgatgggcggggacttcggtcctcgtatcacagtgcctgcatgtttgcgggcgctggcatctaatcctcatttaaaaatattgctggtgggtcaaccagactctatctctcctctgcttgcaaatcaaaatgctgagctaatctcccgtttacatgttataccggctgaacatattgtcgccaatgatgccaaaccttcacatgctattagagcaagtaaaggcacatcaatgcgcgtggcactcgatctggtgaaaacaggggaagcacaggcatgtgtaagtgcaggtaacaccggtgtgttgatggggttagcaaaacttcggctaaaagcgattgatggaatagaacgtcctgcattggtttctgtgttacctaatcagaaaaaaagcaagaccgtcgttcttgatttaggcgcgaacgttaactgtgatagccaaatgttagttcaatttgctgttatgggtgccgtgatggcagaagaaattgcaggtatacattcacctaaagtggcacttttaaatattggtgaagaagagagtaagggattagataatatccgcgaagccgccaccgttcttaaggcgacaccaaatataaactatattggttatgtggaaggtaacgagttactgaccggcaaaacagatgtgttggtgtgtgacggcttcgcaggtaatgtttcccttaaaacaatggaaggggtgattagagtcttcctttcattgattaaatcttctactggtgacaataaaaaaacgtcgtggtggatgaaattattgaagaaatggttacaaaaacgcctaaataagcgttttggccatatgaaccccgaccagtataacggtgcttctctgttaggattacgcggtatcgtcattaaaagccatggtggcgcaaatgaaaacgcgtttacagcagcaatagaacaggctgttcaggccattgagcgacaaattccagaacgaattgcctcacgtctgaatacagtattacccaagagtgattgatagtatgtatacaaaaatcttaggtactggtagttacttgcctgtacaagtgcgaactaatgccgatttagaaaaaatggttgatacatcagacgagtggattgtcaccagaacaggtattcatgaacgtcgtatcgcaacagaagaagaaactgttgccaaaatgggtgcgagtgccgctgagaatgcattagaaatggctgatattgatagacaagaaattggcttaattatcgttgccacaacatcaggctctcatgcgtttccgagtgcggcatgtcaaattcaacacgccctcggtattgctgattgtatcgcgtttgatgttgcagccgcgtgctcaggattcgtttacgcgttaagtatcgctgatcaatttattaaggctggcacggtgaaacaagctttagtgattggtgctgatcgcttatcacatgcgttagatcctaacgatcgcggtacaattattcttttcggtgatgctgctggtgccgtcgttgtcggtgcttctgaagagtcaggtattatttctacacatttacattctgatgggcgttttggtgagctgttagctctgccttatcaggatagagaaaatcaagacttacctgcttatgtcaccatggcagggaatgaagtctttaaagtcgcagttcgtgaacttgcccacattgtggatgaaacattagaagcgaatcatattgataaatcggaactcgactggcttgtgcctcatcaagcaaatttaagaattatttcagcaacagccaaaaagctggatatgacaatggataaagtcgtggtgacattagatcgccacggtaatacgtcagcagcatccgttcctacagcattagatgaagctgtaagagacaatcgcattcaacgtgggcagttaattctgttagaagcgtttggtggcggctttacttggggctctgcacttatccgtttttaatattatcaggaaaataaacatgactgattttgcaatggttttccctggacagggatcacaagcgattggaatgcttgcagaacttgccgagcattatccaatagtgacagaaacatttgctcaagcatctgatgtattgggttattctctttgggatttagtgcaaaatggtcctgaagaagagttaaacaaaacatggaaaacacagccggcattattagcagcatccgttgctatttggcgagtatggcaagaaaaacaaggcaaaatgccacaaatgatggcaggtcacagtcttggtgagtattctgctttagtctgtgctggcgtaattgattttgctgcggcgattaaactagtagaattgcgcggtcaattaatgcaagaggctgtacctgcaggtactggcgccatgtatgcaattatcggattagataatgatgctattgcaaaagcttgtgaagatgcggctcaaggacaagttgtctcacctgtgaactttaactcacccggtcaagtggtgattgcgggtaataaagaagccgtagagcgtgcaggggcattatgtaaagaagctggagcgaaacgtgcgttacctttagcggtaagtgtgccttctcactgtgctttaatgaagcctgctgcagataagttagctgttgcattgcaagaaattgaatttaaacaacctgaaattcaagttgttaataatgttgatgtgaaagcacaaaccgatgctaatgctattcgagatgcattagttcgtcagctttataacccagtccgctggactgaaacggttgaatttattgctggtaagggcatcacacaattattagaaataggacccggtaaagtattaactggtttaacgaaacgtatttctaaagagatgaacgctgcagcagttaatgatattgcatcattagacgctgcattaggaaatgactgagggatctcatgggatttgacggaaaaatagcgctagttactggtgcaagccgtggtattggccgtgcgattgcagaaaagctaatagcatgtggtgctaccgtaattggtacagcaacgagtgaaaacggtgctaaagcgatcagcgaatatttaggcaataaaggtaaaggttttgtgttaaacgtcacagaaactgactctattgaaaaatttttagctgatgtgcgcgcggaatttggcgaaattgatattttggtcaataatgcaggtattactcgtgataacctgttgatgcgcatgaaagatgatgagtggcaagatatcattgacactaatctttcatcagtcttccgtctgtctaaagcagttatgcgtgctatgatgaaaaaacgttatggtcgcataattactattggttcagtagttggaaccatgggtaatgctggacaggcaaactatgcggcagcaaaagcgggtgtgattggttttagtaaatcattagcacgcgaagttgcttcccgtggcattacggtaaatgttgttgctcctggctttatcgaaactgatatgaccagagcgttaacagaagaccaaagagccggtattttatctcaagtgccagctaaccgtttaggtgatgccaaagagattgccagtgctgtagctttcttagcttctgatgaagcaggctatatcacgggtgaaacattgcatgtcaatggcggcatgtacatggtctaattacggggacgtctttatatttgctttttgcgtacaatataatgcaaaatatagcgaataaagtagtccacacagtcgggattggttagatcttttcctgtatttataaactaagaaaatcatcgcgcaagcgagttttgataggaaatttaatagtatgagcactatcgacgaacgcgttaagaaaatcattgttgaacaactgggtgttaaagaggaagaagttgtgaattcagcttcatttgttgatgacttaggcgctgattctcttgacacagttgagctggtaatggctctggaagaagaattcgatatcgaaatcccagacgaagaagcagaaaaaattactacagttcaagctgctattgattacgttgaaaacgcaggtaaataagcttgctaatctaggcggtcactcgaccgcctatattcttaatcctaaactttttccctccttggaggataagcgtgtctaagcgtcgtgtagttgtgaccggactaggcatgttatctcctgtcggtaataacgcagaagcttcttggaaagctgtgtgtgccggacagagtggtatcggccttatcgaagaatttgacaccagtcatcatgcgactaaattcgcaggattggtaaaagatttcaatcatgaagattacaatctttcgcgtaaagatgcgcgcaagatggatctctttattcaatatggtattgcagcaggtgttcaagccattgcggattcaggtcttgaagtaacagaagccaatgcaagtcgtatcggagctgctattggttctggtattggtggcttaggccttatcgaggaaaatcattcatcattaatcaatggtggccctcgtaaaattagcccattctttgttccttcaaccatcattaatatggttgctggccatttaagcattatttatggcttacgtggaccgaccatttctatcgcaactgcatgtacatcaggtgtgcataatatcgggcatgccgctcgtattatcgcttatggtgatgctgatgtgatgttagcgggcggtgctgaaaaagcaacaacaccattaggtgttggtggttttggtgcagtacgtgcattatcaacacgtaatgatgatcctcaagcggcaagtcgcccatgggataaagatcgtgatggtttcgtgttaggtgatggtgcaggtgtgttagtcctcgaagagtatgaacacgctaaagcacgtggcgctaaaatttatgcagaagttgttggctttggtatgagtagtgatgcttaccatatgacctctcctgcagaaaatggtgcgggtggtgcacttgcaatggaaaacgcattgaaagatgcgggtattaccgctgctgatgtcggttatatcaacgcgcatggtacttctactaatgcgggtgatattgcagaagcgcaagctgttgaaacggtatttggcaaagggactgatgtattagttagctcaacaaaatcgatgacgggtcacttattaggtgctgccggggcgattgagtctatctttactattttgtctttacgtgaccaaattgtaccgccaacaatcaatcttgataatcaagatgaacattgtcaccttgatttcgtaccacataaagcgcgtaaagttgagaacatggattatgcactatgtaactcatttggctttggcggtaccaacggttcgattctctttaagcgtgtgtaaaccgcttattcgcgtattgaattagtctaaagacccagacgtcatgctgggtcttttattttatctatagctttgtccttttacattaacttgtttatcatgtacaaaaaatatcaataacatagattataaataaggtgtttgatgtattgggtaaatggacaacagcaacaaagcatcaatgtgagtgatcgcgcggtacaatttggtgatggctgttttacaacacttgccgttgaacaaggtaaacctattctattatctgctcaccttaagcgtttacaacgcggttgtgatgcactgtttttaccctcaccagactggcaatggttagccagccatcttctacaaatagcgtccacaatcactgaaaaaagtgttattaaggtgattattagccgcggaagcggtgggcgaggctattcatcgaaaggctttgacacacccacagtgatcacatcctgctcaacttacccgttttattatcataacttacaaaagcaaggggtttctttagccattagcccagtgagattgggacaaaatagtttattagccggtatcaagcatcttaatcgcttagagcaagtgctgattaaacaccatttagaaacaaccccatttgatgacatgttagtgtgtgacaatgaaggatatttagttgaagcgaatgccgcaaaccttttctggcgtaaaggaaatcaattagttaccccggatattagtctttcgggtgtgaatgggatcatgcgccagcaggtattagattttgcgcaacaattggactgggatattcacattgtgcgagaaaaaccgcaaacgctctatcaagcagatgaaatttggttaaccaatgcactgatgcccattattcccgtaaaacagatctatttttcagatgataagcactatcaatatcgcgatagagacgcttaccatgttgttttacaacactgtttgtcactgacttaacgtttgatgagttataaatgaagataaaaaaattagtttggatagccttttttgcattattgattagcgctggcgcagccacattatatattatgcaaagccttcgtgggttagagaacaatgttgtggtaaagcaagatgaaatgctgcttactgttccggcaggaacagggcgtattgcgatggaacaattgcttattaagaataatcttcttaaacaaggagattattttcaaattttattaaaagtaaaaccagaactcagtcaatttaaagcagggacttatcgtttaacaaaaggtatgacactgcgagatgttttgctgttaataaaaagtggcaaagaggcgcagtttacgattcgatttatcgagggtagccgtttaagtgattggcaagctatttttgataaagctcctgagttaaagattgtcgcaaatggtatggaaagcgataagttacgccaagaaataggaatgaagcctgaaattacccatcttgagggttggtttgctcctgatacttaccattacaccgcaggcacgacggatatcgccattttaaaacgtgcttatcagcaaatggaaaaaacattagaagaagagtggctaaaacgcgatagtgatttaccctataaatctgcctatgaaatgttgattatggcatcgattattgaaaaagagacaggcattgatgcagaaagaaccaaagtggcctcggtgtttgttaatcgtttaaaacgtaatatgcgcttacaaactgatcccactgtgatttatgggttaggtgataaatatcgcggtacaatttatcgcagtgatcttaatggctatacgccttacaatacctaccaaattgatgggctaccgccaacaccgattgctatgccaagtgttgcttccattaaagccgcagcacatcctgcggatacacgttatctctattttgtcgcagatggcactggggggcataaattttctacaacgttggcggagcataataaagccgtcgcacaataccgacgcttacaacaaagataattatgaaaaacagcaaatttattgttattgaaggattagaaggggctggcaaaaccagtgctattcaaacggttgttgatacattaaaacaacaagggatcaccgatttggcctttacgcgcgagccggggggaactccgcttgcagaaaaattacgggaattgattaaacaaggtattgaaggcgaaaaagttaccgataaagctgaattgctaatgttatatgctgcacgagtgcaactggttgaaaatgtgataaaaccagctttagcccaaggtaagtgggtgataggggatagacacgatctctcttcacaagcatatcaaggtggtggtagaggaatagacaaagccctgatgaagtcactacgtgatacggtattagcagattttaaacctgatcttaccctttatcttgatttagatccggcagttggtctagccagagcacgagcaagaggtgaattggacagaatagaaaaagagtctatggactttttttaccgcactcgtgaacgttatcaagcattagcaaaagaagacgcctcgattattaccattgatgcatcacaagatattgataaagtacaagcggatattcgcgatgtactcaatcagtggctgactcaggaaaatagcgcattatgaattggtatccttggttaaatcaggcatatcgacaactggtaagtatgtaccaagaagggcgtggtcatcatgcgattttgttgcatgcatctcaaggaatgggggctgatgcactttcttatggattaagtcgttggttaatgtgtcagaataagcagggttcaaaaagctgtaatgagtgtcatagttgccgtttgatgttggcagaaacacatccagattggcatatcttgcaaaatgaaaagggaaagtcatcaatagggatcgaagcggttagaaaagtcaccgaaaagcttgagcaccatgcacaacaaggtggctcacgagtggtatggataaaagaggttgaggcattaacagaagcggcagccaatgcgttattaaagaccttagaagagccaccagttaattgctattttttattgaattgtcaacaacctgaaatattgctagcaacactacgtagtcgctgtttctattaccatttagcaccgcctgagatgaattatgcgatacattggctacaacaacagctacctaatatggcttatgccgatggtgtcacagcattaaacctatctcaaggtgcgcccgttttagcgttatcattactaaaacaagaatggcaagaaagagaagccttctgccaagcgttatatgttagcttacaacaacgaaatttatatgggttgttagctcagttcaatcaagataatgctgaacgtaagatctattggttattatcattactgttggatgctttaaaacgacaaactcatgctgaagtgtattgtgtcaaccaagataagcagccattaattatggcgttatcacagttgccttctgcaatgttgttagcggtgagcgaaagttggaaacagtgtcgccatcaattagttaccattccagcaatcaataaagagctattgttggcagaacagttacttgattgggaagcccagctagttgctctagggaaataatttccctttctatttagcagacaagtaaaagaaataatataaagttatataacgatgagagtacattatgtttttagttgattcacactgccatcttgacagcttagattatgaaaaactgcacaaaaatattgatgatgttgtagaaaaagcacaacaacgtgatgtcaaatatatgttagctgtcgcaacaacattacccggctttaaaaatatgcgcgaactgatcggcaagcgtgataatgtggctttttcttgtggtattcacccattaaaccttgatgagggacacgatgtcgctgagcttgcgcgccttgcagctgaggccgatgttgttgcattaggcgaaacaggtttagactactattatcaacaagaaaatgcgtcacttcagcgtgaaattttccgtgaacatattcgcattgggcgccaagttaataaacctgttattgtacatacgcgtagcgctcgtgaagatacgctaactattttaaaagaagaaaaggttcaagactgtggcggtgtattgcactgttttacggaagataaagaaacagcaatggcgctacttgatcttggtatgtacatctctttttcaggcattgtgacatttagaaatgccgagcaaattagagaagctgcacgtatcgtaccacttgatcgtattctggttgaaacggactcaccatatttagcgccagtgcctcatcgtggtaaagagaatcaacccgcttatgtacgtgatgttgctgagtatatggccgtattaaaaggggtgagcatagaagagcttgctcagcaaaccacccgtaattttgcaacactttttcaaataccaaacctcgcagactaagttgttcaatagaaatattggcgagtgatggctaggaattaaaataaataataaggtgataaaaatggcagaagagacaatttttagtaaaattattcgtggtgaaattcctgcagatatcgtttttcaagatgatactgtcactgcatttcgtgatatttcaccccaagcgcctactcatattttaattatccccaataaacttattccaacggtaaacgatgttactgcacaagatgaacaagttttaggtcatctatttgttgtggcagctaaaattgctcagcaagaaggtattgcagaagagggatatcgtttagtaatgaattgtaataaacatggtgggcaagaagttttccatattcatatgcatcttttaggtggaaaaccattagggccattattaagcaaataatctaatgtgataatagatcatcatggcaacaaggtagcagcatgataaaacaagctaaaagggtttattcattacttatagtattgttgatgacaacgttattggctggatgttttgcgtctcattcagacaataaactctattttaatcgtcaacaatctattgtgatggagccgtcggttttagctgtaggtattgtggcaggcaaaccattattgacgcgttatgaacaggggagtcgcgccacggtgacgttatcgaatacgcgatcttatcctgtctctattcgttatcgtttttattggtataacgagcaaggactggaaatttctccggcaggccgcgtaaatgatgtgatgattttgggcgatggtgatactgagatcagtgctgatatacccaataaaacagtgagttatgtcagagtctatctctttacttaggataaggtagtcatatgaaaaaaatgctatttgtggtggcagcggtatttttactggcaggttgtccatcgatgttaccacaacaacccccagcacctgtagagcctgttactcccacagagccaacagagccacctaaacctatcgagccacccatagaggttgtaccaacaccgccaaaaataaccagtattaattggaacgcggccattcagccattaattagagagatgtctgtcacggatgatttagcaactggcaaattattagtggttgataatgtaaaaaataattcgggcggaaacatccaagcagttaatgctactaacacaattatcgactcagtaaatagtattagtgcattacaaacagttccttatgcacaaatgatgtcagcaagaaaagcattaggactatccggtgaagatagcttaggattgcgcagtgcggcaattggtttagcgcgttatttgcaagcagactatattttgttttctactgtcgatggtaagaaagataatcgtgtgatcagcatgcaattaatgtcggttgcgagcggagaaatactctggagcgggcgccataaggttgagtaagtcttatcaacaacagttattgagcctattgcgggaatggtttcccgcaatacccttatcacagtggcaaataaccgccttagcgggattagggggcggcacttttcgtttgcaaagtaatgggatagattgggttgctcgttattatggcactgaaaaaacggcactttttgtcagggctaaaaaagagtcttcgattttaaaacagttattaaatactcagcttgcaccaaatattattaaacgccatggtgcatggttttttttccagtggctagagggtgagcatcttactcatcagcagttatttgacccccatctcaaatcattagctcatcaaattgctaagttacatcagcaaaaaccttttgggtttcctcttgatttgtggcatgaactttcagtctattggtatcatattgacagaaaacgattatcaccaaagtggttacgtttacatcacgattttttacgtcaacctcgacgtacactcataaaatacgcgccagctcacatggatcttcatcctgagaatattcttctgagcgattcaggtataaaatttattgattgggaatatgccgctgatattgatacggcagattcattaatgacattttttgccgcaaatcagttaaacagcgcacaacaaacagcatttttacatgagtattgtgcatatcatcactatactgaattaaataatgatcagcaaaataggcaacacccacaacagcagccgttttattcggttaacgtattaaagcagcgtattttattaagagaaccctttatcttgtatatgatgctgatgtggtatgaggttcgttggcaacaaaccaaagataacgcgtttttggctatgtctgaacctttacgtcgctattttagtctgatgaattgaaaagattttattattgcaataacaaagagaggaatgttatgggtcctgtaatgcttgatgttgaaggatatgagctcgataacgaggagcgtgaaattttaaagcatccccttgttggtggtttgatcctctttacccgcaacttccacgacgctgagcagttaaatgaattagtgcgccaaatccgtgatgcttcccatgagcgtttagtgattgccgttgaccaagaaggagggcgagtacagcgctttcgtgatggttttactcgcttacctgccgcgcaatcttatgctgcgcttaatgagcgctatcaagctagtcgcttagcacaagaggccggttggttaatggcatcagaaatgatcgcaatggatattgatattagctttgctcctgtcctagatcttggtcatgactgtattgctatcggtgagcgctctttccatgagtgtccagaaatcgctatggatatggcggaaagctttattaaaggaatgcgctctgcaggtatgaaatcaacaggtaagcattttcctggtcatggtgcagtcagagccgattcccataaagaaacgccacgtgatgagcgctctttaaacgatattcgtcaacgtgatatggctatctttaaagattttatccaacgtcaattattagatgccattatgccagctcatgttatttattctcagattgatgagcgtccagcaagtggctctccttattggttgaaatcaattttacgtgaacaactcggtttccaaggcgttattttctcagatgatttatctatggagggtgccgctattatgggaagttatgcgcagagagcacaacgttcattagatgcgggttgtgatatgcttttagtgtgtaataaccgtaaaggggcggtaagtgtgttagataacctgtcctttgtcaaagcagaacgcatttcggcgttgtaccatcaccgaggtcgttacacattaagtgaactgcaagcatctgatcgttggaaaaaagcgaatcaaatgctgacccaattacaggagcaatggcaggagcgcgcatgattatatatttacatggctttgattccactagtccgggaaatcatgagaaggtattacagctacagtttattgatcctgatgtccgttttctcagttacagtacgttgcatccacgtcacgatatgcaacatctactcaaagagacggataaactgattaaatcgacaaaacagccggtgctgatttgtggtgttggattaggtggctactgggcagagcgtatcggttttttatctaatattcgccaagtaatgattaaccccaatctttttccatatgaaaatatgactgataagattgatagacctgaagagtatttagatattgccactaagtgtattcaagattttcgctctaaaaatagagacaatgcattagtgattttatcccgtcatgatgagattttagataaccagcgttctgctgatgagttatcaccttattattcgattatttgggatgaaacgcagacacataagttcaaaagcttgtcagaacatctttttaaaattaaagcatttaatagcaaaatccccgcttaaaattggcttatgtaagatggacagagtgcattttgtccatctttttttgatttatattttttcttttttttattatttttagcccctctcatattccgactgaattattcacttatatcctctatctaattgatagttatggtaaaaaatagctatatgtcaataagatgttctattggcgaatgaaaaacaacctaaatgactcgattcatcaaaaaacaggtatgaaaattcaaatttttttgatataaatcaactttggtatgaccatattgccaatgagctttggctattatcaaaatcattgactgaaacgttttaactgtcgttatttaagtggatttaaccaagatgacttaaataacaacagtaaatatctttaggagtgacgttatatgtcattaacaaaaattgttatagtcggtggtggagctggtggattagaactagcgactaaattgggtgataagttagggcgcaaaaaaaaagcagaaattacccttgttgatagaaataatagtcacttatggaaacctctgttacatgaagttgccacaggctcgttagatgatggtgttgatgcattaagttatctcgctcatggttataaccatcactttaattttcaattaggcactttaacagggcttgatcgccaacataaaaatatcactttggctgctatttatgatgaaaatcaagagctattagttccagagcgtcaactcgattatgatattttagtcatggccttaggcagtaaatctaatgattttggcaccccagggatcaaagagcactgcatctttttagatagcccacagcaagcacaccgttttcataatgaaatgctcaatttatttttaaaatattcagcagactccaacgcagaagctgaaaatcgtaaagtaaatattgcgattgtgggtggtggtgcaactggagtggaattatctgccgaattacacaatgctgttcgccaactcaatagttatggtttaaaaaaattagcgccatcagcccttaatatcacgcttgttgaggcgggtgagcgaatattacctgcattacccgtgcgtatttcaagtgcagcacatcaagagctgactaagttgggtgtgcgcgtgatgacgaaaaccatggtaacaagcgccgatgaaaaagggttaaataccaaagatggcgagcatattgatgctgatctgatggtttgggctgcggggatcaaagccccagactttatgaaagatatcgctggattagaaaccaatcgtattaaccaattagtcgttaagccgacattacaaacaacattagatgatgcgatttttgcgattggtgattgtgcatcctgtccgcgaaaagagggaggttttgttccgccaagggcacaatccgctcatcaaatggcaagccgttgttatagcaatattttagccatgttaaagggtaaaacgttaaaagaatatgtgtttaaagatcatggctcgttagtttcgctctctaaatttagtacggtagggagtttgatgggcaacttaatgaaaggcgatatgatgatagaagggcgtattgcacgtatcgtttatatttctttataccgtatgcaccaaatcgcgttacatggttatcttaaaacgggtttgatgatgttagttggatcaatcaatcgtgtgattagaccaaaactaaaacttcattagtgaataatggtttatttttctaacttttgtttcttttagcaaacaaaagtttattttaaccccccgcagtatttatattgtcgggggttttatctatctaaagagtagtaataattgtgaacagtcaaaataagaatctctgaattagatgattaattcagtagaaaatatttatgtggatatcgaattaattttttaataatattaagcttcaatttcaaataactttatgaaaaatatagtgttatttctataaatttaattatttatatataaaaataatcttcaatagaataggggtttttcataaattaagatttttcttaaatagaaataggcgcttttaagaatttatttaggtcataaaatgttatggtatttaaagatacatattaaaacttataaataatatatgtgaataaaaaacatgtatttaatctattatttttattatctttatgtacaaaccaatctgttacgcatagtgaaaagcaaatcggctatgtaaaggttaatgaagaagtttcttaaaagagattacatttgttaacttgatgttatcattacgctatatttataaatatgtaaatgaaattagatttcattgatgagataagaaatatttaagttcattcttaatttttttgaaaataattagaaaatagcgcgtatttaattaactgattaaaacaataattagtggtgtatttaccatgttataagtacatagtttacttatgatgttaatcagcaaggacgtaataatatattttttcatataagcttattcattcaacatattgaattacaacgtggtgataaaagagtgaaatccgcttataacaaaaaaatagtaaaatagggataaacgcataaaaaggggaaaaagtgagtgttgatagcaaaaagttcacactaataggactaatccttgtattagctattcttttatttgtcgcttggaagtggatatttccacggccacaatttgcccatgtggtttcagcaacaccgattaaatcaaccgtttttgtgacagaagagtattgccatcgtattggactgcctacacaatttacaccagaaaaattatcgcgttttcatcccgcagagcaagagtgccgtgttttctatatgatagaagcgctaaacaataaaagtattgctcacttcccttatgctcaatttagagaatgtattcccatttaccgccaagaaaggcgagttatcggttatgatgtgctttacacaattgatggtacaccgggtaaagtgagaacgacatttaaaccgggcgatatcatcgcgctagatagcgatggccgacttgttttggagcaagagccatattgttctatgaatgaaaatattccttgccgtaaagagtaacggttttctttttagcattaacgctgataactgataagataaaaaaggcctaatatttattatgttaggcctttttgcattttattatctaaacagacaatgcgtttattttgtgttcactaaaagcggtgagcatatcgtcgataaaagtgagtcgtttttctcgatcggttaggcttatcataaatttcaatttggtagggccatctaaacggaagacgctcggttgctcttgcaataaaccgattaaataagtcgggtcgacattatttttttcaccaaactcaataaagccacctttgtcatgggcttcaatgcgagatatacctaaactcatggcgcttaatcgaatagccgcattacgtaataagttgcgtcctgcatcaggtaaggtgccgaatctatcaataagctctgcccttagatcattaagttcatttaagtctttggcactggcaatacgtttatagaaagagagtcttacattgacatcaggaatatagtcatcgggcaatagcaccggcattcttaattcaatttcggtttgctgattggtcagatcttctaatgatggctctcgaccctcttttaatgcttcaactgcactttctagtaactccatatataaagagaagccaacggtattcatttgaccgctttgctcttcacctaataactctcccgcaccacgaatttctagatcatgtgtggctaaagcaaaacctgcgccgagatcttctagggaggcaatcgcttctaagcgtttatgggcatctttagtcattgctttgggatgaggggttaatagataagcataggcttgatggtgagagcgaccaacgcgtccacgtaattggtgtagctgcgctaaaccaaagtgatcagcacgttcaataataatggtattggcactcggaatatcaatacccgtttctataatggtggtgcagagcaatacattaaatcgttgatggtgaaaatcgttcatcacacgttcaagctcacgttcacgcatttgcccatggccaataccaatacgagcttcaggtactaactgtgctagcctatcacgcgctttctctatattttcaacatcgttatataaatagtacacttgcccgccacgtaatgtttcacgcaagatagcctctctaacaaccagatcatcatattcgcggacaaatgttttaacggataaacggcgagcgggtggggtggcaataattgacagatcacgcataccactcatcgccatatttagcgtacgaggaataggggtggccgttaaggttaatatatcgacattggcacgcattgctttaatacgctctttatgacgtacaccgaagcgatgctcctcatcaacaattaataaccctaagtctttccattgaatgcccggttgtaataatttatgtgtaccaataacgatatcaatggtgccttctgctaatttttcggtgatctgctgttgctctttggcactacgaaaacgtgagatcatctcaatattgaccggccaattagcaaagcgatcacgaaagttttcaaagtgttgttgagccagtagggtagtaggcaccaaaatagccacttgcttattgttgcttattgcaagaaatgccgcacgcatagcaacttctgtcttaccaaaaccaacatcaccacatactagcctatccatggcaatggcttggcacatatcacttaatacggcattaattgccatctcttgatcgggtgtggtttcaaaagggaagctttggcggaaagtgtgatattgttctttatctaatttaaacgcaaaaccagattttacggctcgttgagcgtagacatctaataattccgccgccacatcccgcactttttcggctgctttttggcgtgcacgagtccaagcatcaccccctaatttatgaagaggcgcattttcatccgccccaccagagtagcgactgatcaaatgcagtgacgaaacaggaacatagagtttgtcatctcccgcatacgagaggatcaagtactctgcttttacgccacccgcttctaaggtggtcataccttgataacgacccaccccatgctgaagatggacaacaggttgtccgggacttaattctgccagattgcggatcaatgtatcggtattgatggtgcgacgattatcttgacggcgacggtggactcgctcacctaacatatcactttcgcagatcagcgctaactgacgataattgtcaataaagccatgctctgcagagccaataataaaataacaccctttctctttagcatccgctaattcaataatttgtttgggggcaattttaattctagataagagatcttgaacggtttcccgccggccttcactttcaaccgaaaaaacaatactgccagaaaattgctcttggaaacggcgtagattatcaagcggtgatttactttgtgcattgactgataaatcaggcagtggttgataacctaaattggtataacccgctttttccggcagtgcttgcgttttaagttgaatacgtggccactgttttaactgttgattgagcgtttcgacattaagccaaatatcatctggtggcagtaatggccgcatgggatcaacacgacggctttcataacgttggttgatatcttgccaaaatttatcagcgcaatcttgcagatcttgcgtcacaattaaggtgttttgtgggaaataagcaaataaattggataatggctgactaaaaaagagcggttgccagtattcaatccctgcgggtaatacttgcttacttacttgttgatagatatgttcaggatcacgtcttacttcaaaacgttcacgccattggctacgaaagagttcaatcgcattaggatcagttggaaactcatgagccggtaatagtttgatctgctcgacttctgttaaggtgcgttgcgtatcaacatcaaaagttcttaggctatctatctcatcatcaaaaaagtcaattcgataaggaaattcactgcccatcgggaataggtcaagtaatgcgccgcgtgttgcatactcgccatgttctaacacttgttctacatgacgataacccgcctcatcaaatgttttgcgtaaattgtcgcgagaaagttgctctcctttactcattattaatgcatgacttgcgagataatctgttgggcagactttttgcattaacgtattgacgggtaagattaaaattcccttgagaagtgatggaatacggtatagcgtagaaaggcggttagagattatttcttgatggggagaaaaactgtcgtaaggcaatgtttcccaatcagataatgtctctacaggataatcacaaaactgacggatttcatcttgtaaacgcagtgcattttgcatatcacgagtgacaagaacgactaatccagcatgacgtttgatgatttctgcacattctagggcgcaagcggcacctgtcagctgacccagctggcgagtatccccttgttttacaggaagttgataacgatattctgaggacataagcgtgtaatgtgaactcttggttgtagttaactcccaacacatctttagcgacatcgccaaagcttaaactggcgggcaggttaagataaaagaaaaaaccacagtttgggaatagagtggttccattcagtaagactaccctttattatccctgaacacttagcattagcaacaggaacagcacagttttcatgtacaattctgtctcattttttatagggctccgttatatgcggggtcgcgcagtcgacaaatttggtcgattcgtctcatggctatccgctttagggattatgctgggtgttgcggcattgatcacagtgacttctgtgatgaatggctttgaacgctcattacaaaacagcattttggcctatattccacaagctgttatcacaacacccaatgggcagctacccaaacaagatagtactgcacaaatgttattaaaacgagaagatgttatcaatgtcgttcctttagttgaaggggatgtggtattacaaagtaaagataatatcggtgttggcgtgatgttagggattgataaagcacaagatgaacccctaacacagtttattcgctatggcgatttctcgttattaaaaccgggagaatatggtgtgatcctcggtagtggtttagctaaacagctaaaaaccaaagaaggggatagcattcgccttattgttcccggcgtaagccaactcaccccaatgggccgagtgcctagccaacgactgtttactgtcaaaggtattttccaaagtggtggtgatgctgatgcttctcaacttctggtcaatcaacaagatgcggcgcgtttgatgcgctatcaacccggcaatattaccggatggcgtctattcttctcaaccccccttaatattgaaaaatacagtgctgaacctttgccagcaggtttaagttggaaagattggcgtgaacgaaagggcgaatttttccaagcagtgaaaatggaaaaaaatatgatgggcttattattaagcctaattattgcggtcgccgcgtttaatattattacttcgctttcattactggtgatggaaaaacaaggtgaagtggcaatattacaaaccatgggcttaaagcgttcacagataatgtctatttttatgctacaaggagcaggtgccggtattttaggtgctattgccggaggtttgttaggggcgttactatcaagccaactaaatgtgattatgcctgcggtagggcttattcctcatggggtagaattacccgcgactttagagtggagccgagtctttatgattggttttgccgctattgtgatttcactattatcgactttatacccgtcttggcgggccgcaactattcagccagcagaggcgctacgttatgagtaatacccctttattacaatgtcatgcactttgtaagcagtatcaagatggtgctatttcaacacaagtcttaaaatccgtctctttcgcgatcaatcaaggtgattttatggcgattgtcggcagctcaggttcaggtaaaagtaccctattacatttattgggtggtttagattctccaacctcaggtgaagtgatatttaaagggcaatcgctcaataaattaacttcaacggcaaaagcggatttacgtaatactcaattgggttttatctaccaattccaccatttattacctgattttactgcattagaaaatgttgcaatgcctctaatgattggtggaatgagtgcagtaaaggccaaacagaaagcgatgtctttacttgatgccgtaggattaactgctcgtgcacatcatcgtccttctgagttatctgggggagaaagacaacgtgttgctattgctagagccttagtaaacgatccggcgttagttttagccgatgagccgacaggtaatcttgaccaaaaaaatgcggaaggtattttcgaattactcatgaaattaaataaagaaaagaaaactgcctttttggttgttactcatgatttatctctcgcggcacgctttcaacgtcaacttgaaatgaaagatggtcaattagagtctcaagaagcgatttcaggagtggaataatggcgcagttgccacttgctttagttaccgcattacgtttttcaaaaggacgaaaacgtgctggtatggtgtcattaatttcgattatctcaacgctgggcattatgttgggtgtagcggtattgattatcggattaagtgccatgaacggttttgaacgtgaattaaaaaaccgcattctttctgtggttccccatggacaaatttattcggtagaacaaccctttatatcttggcaaccggcactatcgcggattgaaaatactgagggtgttgttgctgctgccccctatattttattaaccggattacttgaaaaaggaaccgaattaaaagcggtacaagtgatgggggttgaaccgaataaacaaagtgatatcagtttattaccgagctatgtgcaaaataatgcatggcaacattttcaagcgggtcaacagcaaatcattattggccaaggtgttgccgatgccttaaaaatcaaacaaggtgattggttaactattctgatccctaacaatgatgatccgaaaaagctattacaacctaaacgcattcgtttacaagtcagtggtatatttaaactcagtggtatgctcgatcaccaattagcgttaattccattggcagatgcgcaacagtatcttgattacggcaaaggaattacgggtattgaagtgaaaacaagcgatccatttctagctaatgaaattattcataatgcaggcttaaatagccaagcctatgtttatgctaaaagctggatcagcgattatggttatatgtatagcgatattcagatgatccgcagcattatgtatctctcaatgattttagtgattggggttgcttgttttaatattgtctcgacgctgattatggcggtaagagataagagcggagatattgctattttacgaacgttaggtgcaagggatagccatattcgcaatattttcttatggtacggactgttgtcaggcatgatcggatgcgtggccggtgttattatgggggtagttgtctcactaaatttaacccctattgtctcggtaattgaatccatgacagggcatagtgtgttatcaggagatgtctattttgtcgatttcttaccttcagaaatacatgcaattgatgttttctccgtatttttgacgacggttattttgagtttgattgccagttggtatcctgctcgtcgagcaactaaactcgatcctgctagaattttaagtggacagtaagtttattgacataaaatggatataaacggaaataagacagtaaagttatcaatttttattgattgttaaatataaaaaccaaggattgccatgatgaaacttaaacttcgtcatcgtcggcttaggaagtttcgtaagataaaaagtttacgtagacaacactcacgttgtcgttattttcatttaacccataaaacggaacatgaaatgaatttacccaaagtagtggtgctaaccggggcgggcatttcggctgaatcaggtataaaaacctttcgatcagaagatggattgtgggaagagcatcgcgttgaagatgtggcaacgccagagggatatcaccgcaaccctaagctggttcagcagttttacaatgagcgccgtcgtcaattacaacaaccctcaattcaacctaatgaagcacattatgcattagcaaaacttgagcaatatcttggaaaggacaatttcctgctggtcacgcagaatattgataacttacatgaaaaagcagggagtaaacatattctccatatgcatggtgagttattgaaagtccgctgtccgcaatcaggtcaagtttttgaatggaaaggggatttatcaacgacagattattgccattgttgccaatttccctctcctctacgtccacatattgtttggtttggcgaaatgccaatcggcatggatgaaatttatcacgctttagcacaggcagatctctttatcgctattggcacttcggggaatgtctatcctgctgctgggtttgtccatgaagcacggttaacaggggctcacacggttgagcttaaccttgaacctagcttagtggagagtgagtttgaagaaaaacattatggccccgcaagccaagtggttgatgcatatgtccataaattgtttgatttaattaatgatcctaaagctgatttgacgcaataattattttatagagttccctattattgttattagagagatttagggggcaaaatggataaattattagaacggttttttgaatacattagttttgatacacaatcgaaaccatcatcgaaaatgtcaccaagtagcgatggtcagctaaaattagcgaaggcactggtacaagaattaaaaaaactgggtttttctgatgtgacactcagtgataaaggatgcgttatggcgagtttgccctctaacgtatcttggcctgtacctgttattggctttatttcccatcttgatacttcacctgatttttcaggtaaacatgtaaaacctcaagtgcttgaagattaccgtggtggtgatatcgcgctaggtattggtgatgaagtattatcaccggttatgtttccaattttacactcaatgattggtaaaacattaattacaacggatggtaaaactctattaggtgctgatgataaagccggtatcgcagagatagtcactgcgatggtacgtttaaaagcacaaaatcgacctcatggtgatatccgtattgcatttacgccggatgaagagatagggcgtggtgcacattatgtcgacctaaaagcatttggtgctaactgggcatataccgttgatggtggtggtgtgggcgaattggaatatgaaaatttcaatgccgcttctgtgagtattaaaatcgttggtaataatgttcatcccggtagtgccaaaggcgtgatggtaaatgcgttaggactcgcttcgcgtattcaccaagaattacctgttgaagagacccctgaaaacacagaaggctatgaaggtttttatcacctacaaagtattaaaggtacggtggaaagagccgaaatgcactatattattcgtgattttgatcgcaatcagtttgaaaagcgtaaacaaaacatgatcacgattgctgaaaaagtaggtaaaggtctacatcctgattgctatattgaactaactattgatgatagctactacaatatgcatgataaagtggttcagtatccacatgttattgatattgcaaaacaagcaatgattgattgtgatattgaacctgatattaagcctattcgtggtggtacagacggtgctcaactctcttaccgcggattaccttgcccaaatatcttcacgggtgggtataattttcatggcaaacatgaatttatctctttagaaggtatggaagccgcagtaagtgttattatgcgaattgctgaaattactgccgaaagagaaaaagcaaaagttatttgttaatagagcagttatgtaaaataattgccccataatagccgacaatctcggctattattttatctttgtcttttaaatataggtttgttttcatataatttaaaattaaactttaaaaataagtttgttttttataagttattggccgattatttcaaataatattctttataatctaaataaaatgatataaggatatttgcgtaatggctgtactctccaaaataataataaaacaaacaagatcagaatgtctgtgtaaaaaaataccgataaccagtgataatacttttagtaaacaagagtataaagcatcgtttattatcgttttcagctattttttaattacccatcttattatattttctttatatttatcaaatgataagcatacctggttacttttagggctacagagtgcgttctttatcattttgccatggttattttatggcacaagaacgttactaaaagaggcaatatattatttaataagataacagttactgtttattaacatagttaaaataacacccagctataattagctgggtgtgtttgtataaaaatagtttatttatacttaatcttcaaaataccaatagccttggttaacaagatgcgtcaataagcgtataaattttggatctgctaaagcatcacctaaatgttgtttatcaatacaatcatattggcaaagggcatctgcagcttcaatatgatgagtatccattaattcaccattaacaaagcaactatcaccaacacgcagtgcgcgaataccgtttaaacgatgaagttgttcaccttgttgcagtaaatcgtggatctcagcattttcatataaaggttcaggaatggccaagtcaagttcatggcgagattgagaaataaactccccaaaccaatgacggaatacttcgggttgggcaagtaagtcttccatcatatcatgcaacttatttaattcttgatgctggactaatgccggattatctcgaggagtaagatcaggatcactgtaacggtagcttcctaagtcatttgctaaaacatagtcagcaaaaccgctaaatagctctcgtgcattaggtgctctaaagccaacagaatagtttagtgattcttcaatggcataaccttcatgaggaaatccaggtggaatatacagaatatcacccggctctaattcttcatcgataatggcatcaaaaggatcaacttgaagtaaatccgggtgagggcagtgctgtttcattgggattttctcacccacacgccaacgacgacgaccttgcccttgaataataaatacgtcatattgatcaagatgagggcccacaccgcctccgggaacagagtaagagatcatcaaatcatcaatacgccaatcgggcaacacacgaaaaggtttcatcaatgccgcacttggaaaatgccagtgatcgaccgcttgaactaataacgaccaatctttatcgcccaaaccttcaaagtgctcaaaaggcccatgtttaactccccactgcccatcttgacaactcacaagacggctatccacttcatcttccattgcaagacccgcaagttcatcaggagataaaggatcaataaaaccagagaagccgtttttgattaataaaggacgtttttgccaatggctttctaaaaatgattgccaatctaaattaagtttatagtccattgtgtatttcctgaatttgggaagcctaaaaatatcatataatgaattacaacttcctgctaaacattccttggtgcaatgtgagtaataacgagtaatatactgacaactgcgtagttatcatacatctcgcaatcttattgtgataagacctaaattgaatcagcaataatataagttgatagagaagagcgttactctatttcagtagtgagttgttgctcagcaaaggtgacgatgagtctcgccccccctaatggactatcggtaatggtgatatcaccgttatactgctcaataatatcaacagcaattgataatcctaagccttgtcctgggcgcaatgtatctgcacgtgtaccacgctgaaaaataagctcccttttttctgggctgactcctgggccatcatcatctacggtgataatcacacaattgtcatcatgacttacattgatctcgacaaactctaaacagtacttacaagcattatcaagtacatttcccatgacttccataaaatcattcttttcacctaaccacatcatttcaggggaaacatttaatgttatatcaacgcctttggattgatagaccttattaagtgcactacaaagattgtcaagtaagcctgataaagagtggagcttacgtgttgttatatcgtgatcgccgtgaagagaagctcgatgtaaataataaccaacttgctgtgaaattcgttcaatttgactttgcataattggctcagcttgttctatagacatttgtttgccagcacgtagagcacgtaatgttgattgtaaaacagcaaggggggtttttaagctatgggtcagatcagataaactggtacggtatttactataacggttgcgttcattacgcaataaaatgttgagattataaactaatcctttgagctctttaggaggattttcatctaaattatcgcgagtgcctttttccaacgcgctgatctgctcaataatggatttaatcggccttaaactccaatgggctgctaaccaaattaatgggatcaccaaaagaaaattagctagtaatatatagagaaaccaatcccagactctacttacattttgcagactttgaggaataggatcgataaccgcaatggatagataaggcatattatccgccgcaggatagtgattaataaccacggaatgcgttaaggtatcattacttgaatattcgttgagtttttttagataggctcgatattgaggcagttgctgtaacataaaacgtgtcgttttaacattcacactaatttcaaataagccttctttattgcgccattttggcgcgatactgtttgggatcacctgaggtaaatccgttggcgtccatagcacattgcctttctcgtcgaaaataaccaccagcgatgtgttgttgttattgaggttagtcggaaattcaatctgcaattgcccatctttccattgcgctaagctatagtagagattactttggctacgcattagcataaaagtcgttttatcaaaactgacaatagaaccgactatggcaaccaaaccataagagagtgtcagtgctaaaataatggcgctggtggcaagtaaaaatcttgttcgtaaagagaagggcgaacgttgttttttatgcatattaagctttcatatcaaaacgataaccttgtccacgtacagttacaatgacatcattatcatatttttggagaatttttttgcgcagacgccccataagaacatcaatggtatgactttctcgctgctctgcatcaggataaagttggcgcattagcacatctttgctcaccactttgttttgattacgcattaatgtttctaaaatagtatattcgaatgcagtgagcttgatttgctcacctaagatcatgaactctttacgtgataaatccaactcaaaaggggcaatagtcagtatttgtgatgcaatgcccatgtttcttcgcattaatgcctgaacgcgtgccacgatctcttcaaaatgaaaaggctttgtcacataatcatcagcaccggcatttaatgcggtcactttttcctgccagctttctcgagccgttaataccataatgggaatagtaatattattttcccgccatcgacgaataaggctgataccatcttcatcaggaagacctaaatcaacaatggcgacatcaggtgtactttctgcgataaagtgatcggcttctttcgcatcctgtgctgcatcaacttgatgtcctgcatcgcgaaactgcacagataaatgatggcgaagtaagatattatcttcaataattaagatccgcatattccaccttgtgtacatcagtaaaaatcagttgctataagagaaattaagataatgatagtcaatctagcacttaaagaataccgtaacggacaatgtgtttaagttatagatagtttttatcttatttaggacgggttatcgatataaaaaaaggcagagattatctgccttttaagtatgggataaattaatctaatttatcaacaagttgactggcaaaaccaatatagctttcaggtgtcatcgcttttaagcgtgctttttcttgttctggtagcgctaaaccgtcaataaacacaaccatatcttgtgccgtgatccgtttaccacgagttaactctttaagtttttcataaggcttttcaataccatagcgacgcataaccgtttggattggttcagcaagaacttcccagttgctatctaactcttcacgaagatgactttcattaacttctaatttatttaagcctttcatggttgattggtaagcgattaatgcataaccgataccgacacctaggttacgtagtacggttgagtcagttaaatcacgttgccaacgcgaaactggtaatttgctggaaagatgccccataacggcattagctaaacctaaattaccttcagagttttcaaaatcgataggattcactttatgaggcattgttgatgagccaatctcaccggcaatggtcttctgtttgaagtgattaagagcgatataaccccaaatatcacggtcaaaatcaattaaaattgtattaaagcggctgatgcaatcaaaaagctcggcaatatagtcgtgtggctcaatttgagtagtatatgggttccatgtgatccccaatgaagtaacaaattcttcactaaattggtgccaatcaacttcaggataggcagctaggtgagcattatagttacctactgcaccattaattttacctaaaatttctacttgagtaagctggcgatattgacgctccatacggtatgcaacgtttgcaaactcttttcctaccgttgaaggtgttgccggttgtccgtgagtacgagaaagcaggggtaaatcacgatatgcttgcgccattttactgatagtatcaataagctcgcgccatgcaggtagtagcacttcttggcgtgctgtttctaacatgatggcatgggataaattattaatatcttcagaagtacaagcgaagtgaataaactcagaaacttgctgtagtgcagggatagctgccactttttcttttaagaaatattcaaccgctttcacatcatgattggtggtgcgctcgatagttttgatacgggcagcatcatcttcattgaagttagcaacaattgcatcaaggtaatcgattgcgttttgttcaaaggcgggaacttctttaatgtcggtgcaagatgctagcttttgtagccagcgaacttctacctgtacacggaatttcaaaagaccgaattcactaaaaatagtccgtaacgacgaggttttactaccgtaacgaccgtcaatcggtgaaatcgctgtcagcgaagataattccattgttggcaactcccaggttgaattttaaagtattaacattgagcgagaaaatcatcagtttgtcgtaagatggttttttgatggagtaaaaaatcaaaacggcgaccacctacttgacgccaaagtacggcactacgaagacctgtcagaagtaatccacgaactttggcttgaataatagggtttttaagtaactcaatcgaaccattaacttgaatttttggccctacagggctgaccgcatcactataaacgccagcgagagcattaaataatccgtcagaaagcggttcaaaataatttttttgtcgttcaagttgagatattttttgtgacaaatgcgaactgtaatcgttatttttgttgatgatacgttcaaggttaatcaggccttgttgataagtcatcaactcaaacgtgagtttttctcttcttaccgcttgatggatagcttttatggtttgaaaacctaatttcaaatgacttatttgattactataaacatccaaggttgaagttgggttgatattaaaaatgctgttaaccatgacttcaacatctttctcgtctgcattcccttgataagcaatttgctgaacaagacgacttgcctggcagatacctgccagtgcaagggtaatatcacgaaaatctttagccacatctactcctgaatacgtgtttcaataataccgccacctaaacagacttcgtcttgatagaaaacggccgattgccctggtgtaacagcagcaacaggatagtcaaaacggacttcaattttatcttcatctaatggtgttactgtacacggaatatcagcttggcgatatcgtgttttcaccgtgcaacgaaaagcttcggtaataggctctcttgcgacccaatgaagttgttgagcaattaagcctacggacattaatcgagggtgttcatgaccttgtgcgacaattaatatgttatttgcaacatctttatcgactacataccaaggatcttcgctaccttcttttgtgccaccgatacccagacctttacgttgacctaaggtgtgatacatcaacccttgatgttcaccaatggtttcgccatctacggtgacgataggacccggtttggcaggtaaatagcgcgataagaaatcagtaaacttgcgttcaccgataaaacagatccccgtagagtcttttttcttggcggtggctaaatcaagcttctctgcaatttttctcacctcaggtttttccatttcaccgacagggaaaaggctttgggcgatttgctgatgacttaatgtatataagaagtagctttgatctttgttgttatcaacaccgcgcagtaattggcttttaccatcaatatcacggcgacgaacatagtggcccgttgcaatatagtcggcccctaaatcttcagctgcatattctaaaaatgctttaaattttatctctttattacatagaatatcgggattaggggtgcggccagctttatattcagataaaaagtgttcaaatacattatcccaatattcagcggcaaaattgatagtgtgaagttctatgccaagcttatcgcacacggcttgcgcgtcggcaaggtcggcagaagctgagcaatattctgtatcgtcatcttcttcccagttcttcataaacagaccaacgacctgatatccctgttccttaagaagataggctgagacggatgaatctacgccaccggacattccaacgatgacttttttttggctgttatctgacatgaatggatctcactgcggaaaaataagcgccatactttaccatatcactatcaagggtgcatcaaacgaatacattttttgccttcttaactatgaaagtcattgttaagaggcaaatgttgaaccaaagctatccagtaaagagagtggataacgttcattttgttgataacaaagaatactttcttttaccagcggtgaacgtaattgttggctattgattatctcttgcgcggtcacccagtagcagccattaatatcatcgtcatgtggttgtgtggctaattgttctggtgcttctatcaaaaataaaaaacgcaaaaatggcgtattgtccggtgccacccactgatgtaatttcaaaaaatattgtaccggcaaggttaaaccggtttcttcccataactctcgttgtgccgcttggatcagggtttcatttgcttctaaatgtcctgcgggttgattccatgtggctttgccatttaccgtttcttcaacaactaaaaatttattgtttgcatgaacaatacaagcaacagtgacatgtggtttaaacaaaattaatctccttccattgacccggtaatagattatccaaggtaatatttcccatgctaaaacgaattaagcgtaatgtgggataaccaatatgggcagtcatacgtctaacttggcggttttttccttcaaataaagtgatttttaaccagctagtcggaatagattgacgctctctaataggtggaaatcgcgtccaaacccacgttggctgttctaccctttcaatttttgcaggtagtgttttcccatcctttaggttaagtccttcacgaaattgttgtaacgctatctctgtgggaatgccttctacttgagcatagtagactttccctgtttttttatttggttgagttaatttggcctgtaatttgccatcatttgttaatactaacagaccttcactatctctatctaaccgtcctgccgcataaatatcaggaatggggataaaatcttttagcgtttttctaccgctgtcatcggtaaattgcacaaggacatcgaagggtttattaaagataatcactttacgctcacctctagggcgagaaggttttttttgtcctgctagtgcgtgagatttgcgtagtttcgatctattgttaaattgatttgccatagctattttttgtcaaaaatgggagattgattataccttaaaagagaagcgattggcgttagctgaataatcaagtagtattgacaggtctcttacaaaaaattaacaaagcgtgcgcttacatgaaaggagaggtaaatggaaagcaaagtagttgttccggctaatggtgctaaaattacattagatgctaaaggtaagcttgttgttccaaataatccggttatcccttatatcgaaggggatggtatcggtatcgatgtcacgccagcaatgttaaaagttgttgatgcagcggttgaaaaagcttacggcaatgaacgtaagattgagtggatggaagtctacaccggtgaaaaatcaacacaaatttatggtaaagatgtttggctgccagaagaaaccttagatcttattcgtgaatatcgtgtttctattaaaggtcctcttactacaccagtaggtggtggtatccgttcattaaatgtggcactacgccaacaactcgacctttacgtttgcctgcgcccagtgcgttattacaaaggcactccaagcccagtaaaacacccagaactgacggatatggttatcttccgtgaaaactcagaagatatctatgccggtattgagtggaaagccggctcagcagaagctgataaagtgattaagttcctgcaagatgaaatgggtgtaaccaaaattcgcttcccacaagattgtggtatcggtattaagccatgttcagaagaggggactaaacgtttagttcgcgcagcgattgaatatgcaattgataacgatcgcgactccgttacattggtgcataaaggtaatattatgaaatttaccgaaggtgcctttaaagattggggttacgaattagcccgtgaagaatttggtggtgagctgttagatggtggcccttgggttaaaattaagaaccctaaatcaggtaaagatattattgttaaagatgttatcgcagatgcattcttacaacaaatcctgttacgcccagccgagtatgatgttatcgcttgtatgaacctaaacggtgactatatttctgatgcattagcagcacaagttggcggtattgggattgctcctggcgctaatattggtgatgagtgtgcattatttgaagcgactcacggaacagcaccaaaatatgccggacaagataaagttaacccaggctctattattctctccgcggagatgatgctacgccatatgggttggacagaagccgctgacttaatcattaaaggtatggaaggcgcaatcgaagcgaagaccgttacttatgatttcgaacgtctaatggacggcgctaaactgctgaaatgtagcgagtttggtgacgcgattatcaaacatatgtaattattgatttgataaatagttaacgggagcttattagttcccgtttattttttgtactataaaattattccccaaaaccccaccaaaactattccccaaaactgtttaattaaacagcaataatttgccattctttgcctctatcgtcgtgatatttatcagtcattttttgggttttatggcctaataatttttgtgtatttattccttgttcgcgataaagtctctcagacaaagagcgttgttcgtgaaaggttggtgcagtacctttctcccaagttaacccacacttatctcgcgcttttttaaacgttgtggttaatgtatttggcgtggcttgttcgcctcgttttgcttgggatgttgtatgccgataatgtacaagatatttactcacaacggcatcacgacaccttgcaatgacatcccttaaggacatattaagggcatcgcattttaatgataatgggatagctaatttactgcctgttttttcctgctgcacatgcaacatgtcatcccaaatatccgtaaatttcatattacaaatatcacctattctttgaccagtaattaacgcaagcaacattccacattgcaggtaagggggatgcttttcagcttgtagataaatagtattccactcatcaagcgtcatacgctctcttttaaccctatttctaggctgttttgttgctttagctggattgtaaccaggaggaacgtagccagcatgttgagcttctttaaatacatcaatgagcaccatgcgaacgacctgagccattcttgaatgtcctaatgctttgactgaatctattatttcggcaatatctaaagcagttatctctttcaatattttcgtaccacaatactgacgaaataaattaataggtttcattttctgtcgataagaattaatttttaattcaccgatatctaatctttctttttgaatatccaaatatttatccacccatatatcaacagatatttcagacttgtttgtcttaatttttgataaccgttcattaatacttaataactgtcgagtatgttgttcagcaataattgtattggcttgaatagccgtttctctcgcttcttgctcgtcggtgcctaaactatgaaattttcccgttatagggtgtttatattgccaataaatttttccattacgcttatctaatttacggtataagttaggaatggttattttatgggttcgcggtctggcagccatctgaaattatcctctgaagtcgctccgttgatttagtcggaatttttggtaaagataaataacccacataacgagcttctctatcgaccatccactttctaccaactttcattgctggaggtgcgataagattatttcttgcgtatttttgtaataccgttatgctgggggattcttcaccaaattccaacatagcccacgcctcaagacttaccattcttgacatattttctctccacactgtccgtacacagtttaaatagatattcgttaatgctggtggtaattatttactgatctccttaagaaaagagatccagtgcgttttatcgttcttacctacacgctgtaccgctgttggtttttggtctgttagtgctaaaatttgtttaacaggtatttgggtttcattccatttgaacagcaatgttcctccaggcctaagcactctaaatgcttcactaaacctttttgataaatcgtctttccatgactctttatttaatcgcccgtactttttaaacatccaactatttttaccaactctaattaaatgaggtgggtcaaatagtacttgataaaaggtattatctggtaatggcaggtttttaaaatcagaaataatatctggtgttatatttaaaattcttccatcacataaaatatgttcttcagctctaatatcattaaataaaactcggtcgtcttgtttatcaaaataaaacatgcgagagccacaacacatatcaagtattggtttcatttttatataccaactttgatttaatccaattttcagcttcatcattgcataacaaaacactatccatcattaattcaatatcgatagattcctttgcaatgtgagataatgcattcataaacattgcaaacggtttctcatcacactctataaagttagctctgtatgcgctaattaaatgattgcgagcatatagaacgcctaatttcatttgttctctattgtatttatccatcataccacctttatttgctttaatgcctcgcgaacagcgtttaatcgtgattccattcttagatattgagggttaggtatagtgggccaatcgttataccaagcatcatcaccaaacaaactaagcaacttaccacctaaaaaactattacagcactcatctttaacattatctgatgcttcgattaaatcccaatattcccttgcttcatatttatctatttcattatcgttgcgtagtttgataacttgttttttagcgtattcagcatttgcatcgtcatcatcatctatctcatagattaaattagaatctaacttgcctatccagtagtgattattgatacgctgaataaactcaattagtgggctacccatcgagccccaaaagcaagaccatgaatttccccattcgctaatagtgacacgaccgttttgattatctccataatcctcaaggtaaacatgaatagggtcgtgacgctcgacatcagttattactaacttagtaacttgagattgttcaactttcatcgttgcaccttatccctctgtcttcacataccaatcaacaagattatcaattgcagtattgatatatcctgattgctcttcttcggttaatttatcccattcgtcctcagtaatacccagcccacattcagagtcagaaccaaccttatttgttcttgcaactaaaaccatccgcttactcatattcattcctcttattgcatccctgcgagttaattagtccagctgaatggcgccttcttctggatattcagtacagtaaaatacatgcacacgaccggtttctttgtctctacatggctcgatggtgtattcagtctcatcattaatgtctaatccgtgtgtgtctacctttaagccagcaaaatcagccatagccattatttgctttgttgttaatgtaatagccatatctatctcctgtttgcatccttgcactgagtaagtgggttaaaccacattaattaaatggcgtggatacataagcccaataggtgcgaagggaatatcatcctcaaaatccattggtggctgactactctgtgcttgaggttgagccggtggcgggttttgctgtgccggttgtgaacctgctgatttactagcaccacctagcatttgcattgaaccgccaatctttacaacaatttctgttgtatagcgtttaacaccgttatcatcccattcgcgcgtttgtagttggccctcgatataaacttgggagcctttacacaaatagccactggcgatatctgcaagctttccaaacaaaacgacacgatgccattctgttttttcgcgattttcacctgtttgtttgtcacgccatttctctgatgtggccacagctaaattggcaacagcaccaccagaaggcaggtagcgaatttcaggatcacgccctaaattgccgataagaattactttgtttactgatccgttagccattttcagttattcctatttgagtaatatcgccaccaataagatggcgattaattaataattaagctgaaaacttgccaatgaatgtttcgatatcactttcatcaaattcatcacaaagtagattgcgaaactcttgagcgatttgttcttcaaggttttcaagttggacaatacggagcactaaaacgggaacatcaccgccagtaagcacgctataacgcaatttaatactacgttcttttaactcgtcatatggggtgcaggtaaactggaatgcagtaggcataacatctttgcttcttgcttcaacattttctaatactgaacgtttggcgctaaaatcgtgatcttcatgttcagcagagcgtgttgattcaattgtaatacggcggacagcagaaatagcttgtttgatatctaaaacattgccgtcagcatcaaacgccattaaataatcacgccagtcttctaaccattccgctaattctttttgacgatgtttaacaccatcaatttttaatagtgctgcgaatggggcagtttgttttaatttcacaagagcagtattatcagcatgaccaggctcaccaattgtgccgatattaaaaatagttttggcactcatttcatcggcatcaataaagcagctaacaccttcatcaattgcatttttgattgagtatttaacaaagtcactgatactggttgttttcatttcaccacggaaacggaagcgaccttcttgtaaattttccaaactactcactttaaattcatttggaagaacaatggcggggcaaagagatttctctattgcttcgagacttaatgaagccactgccatattttgaatttgcgaaatagcactaccgtctaattgagacatgaataaactcctacttatttaaaagcattaaattaaatggataggtttaattaaaaataaggaaactaattaacggattttaatttcccgtcgggctgaccttgcaaagaaaataattgaccttggtcttcttgcataatggtcaacttaccacctttacctacgtacattggtgttttagtagtatcttcttcagcccgtttcccgcgtggtgttggtgcagagaacttaagtttatgagttatttcaactcgtttttcttccattgaattactaaggcgagcaaaatctaattcaatagtgactttgccttttccaccattatttaaaacgcctaaagccacatcatttaaaacagcagagactttattttcaaaaacgccagcgtccaattcggaaagaaagtcagggacatttgtcttacgatcttcttggctcatttctataacctcacgttatcacttcacacaataagaaagggcactagcgagttgacataatcctgataagacatttcacaaataatgccagtacccttgcttattgttagactcataatcaaaaagagcggaccacctgtggttgcatcagcccgattgggattcggatttctagctgactgcgggttactttttttcacgcccacgctctttggttataaaactaactttataaaaatggctgactgagcagaacattatcaccacaaccccttttaatggtaaaagactcagtcagccattgtttctcttcacacgttctcttcacacataaaaatcatttattttgtgtttgaatagcacttttgattctgtactcgtctatttcagcatctagtttgcaatatcttcatcagtgaaacttactggaagtatgattactggttcagttatcatttacttttccttcacatataaaaatttagcttattgttataaatgatattaggctaagcctaatctttagtcaataggctatgcctaataaattaaatgaaattagacgatgattattttttatatcaaaatcaattgagtagataattaggaaaggcctagcttaacaagtttccatcagaccaaatgagtttaagctggacgctttgaggattttttattgcttttattgttatttaaccattcagaggcttgtcgttctaaagttataatgtatgccctagtatcactattaacccaagaaggttcttttgtattattttgcagcaaaagatattttattatttcttttctttctgccgaagctgacatataagcatgaataaggctattaagttgatgttcatcatgtgtacatcttgattcagctttatttactgggaggtgaaactcctttaagccccaatgttcaggtccaacaacatcagaaaaataactccataattcaggtagcttatcttttgaaatggagcctttttttatccaatcataaatagatggtagctttacattgaaatgtcgagcaatctcagtttttgatttaactgatcctgatgatagttttttattaattgcctgctctatcgctcggcctaaatctttaccattaagcatagcctaattatcttatctttatattgtgtaggcaattcctattgatttaacattaggcttagcctaacattgtatttcaatataggccggaggtaattgaataatggatcaaataagtgccacaaccgcaataaaaaaagcatgtaattatgtcggtgggcagtctgaaatggctaaacgcttgggtatttcaccgcctacagtaaatcaatggatcaatggaactcgaaaaattccagcacgacgttgccctgaaatagaaaaagtaacttcaggagtggttcgatgtgaagaactaaggcctgatgttgattggtcttatttacggggaactcaacaatgatttttatacttactttattgaaataaacaatagcaaaacagtttaaagcagttaactacaagaacttatcaatggtggtaggaaatgaatcactcaataaaattaacgtcgtttaataaaaaccataaggttattgatattggggatcatctctgcagggttcctaataacaggataaatccaatcgttctcataaagctcattgcttttaagagtatcaaaaaagctgtctacggcatggttatagttgttgcattgtcttgtggtcaagtgagggcgcaaggctctgaagtcatcacgagtgatgcggggcatgtctcttttcccgtctttacaatcgtcgaggaatttatcaagaagcaagaacaacggatctgcaatggcattgaattcctttcttttgtctcttctgcgagcgagggaatgaccaagccaagttcccaagaaaaaggaaaaaatagcccaaaagaaagtaataagactgaggctggttttgagaaacgagaccaagtgacccaagaagatatcgagcatgttaagtcatcccttatcggtatgttatttgcgtccttagtgatgatcccactagggataatgtttagcgagtgtattagcccacgaatattagcaaaacgtaagcgctggatgaagcttcatgagctaaaagccaaacggttttaccggaacaacccagggaagtattacgtgatgccacgcaagactttttgccaatggctgtggttttaataaagagaggtatttatgagtaaccaatcaataaaacaagtagtgaaagaaatgtgtgaggcaacagctggtgggcgtgaagcgatggctggtgcgcttggcctgtctttaacatcattcaataacaagctgtatgaaaaaaacggctgtcgttcatttgatttaaacgaactgttagccatgcaagatatttctaaaactgttctgtttgctgaattcattgctcgtgagtctggaatgttgctggtggaacgtattaaacccgacgagatagatgaacctgagttatttcgtctacacaacaaagttggttcaaaacaaggcgaactggcaatttttttagaaaaaagtttagaggatggcgttgttgatagtgaagaagagaaacaacttaacgtaatgctagatcgcgtaatagcaagtggtcgtgcatttgttaatgcatttatctcattacatcggaagaaaaaataatgatgggctttagaaagggtgaagccaacgatgtacggtcgctggcttcggtttgcaaatttcaattgtgtgaagagaaattagcatgagtagattatcaaacttagcatgtcgcacgcaagtgcgagcttcaatacgtgatggccgttttgtctatgaaattaaagtaccaaatggctaccaagaaaccaactaccaatttatgcgttggctggtagatgattttaattcaaagaatgggctgaggacgaggcaatgaacaatgagaacccaaaccaacttgatcgctactataaaaatcaccgaggtatcgttgttcatgttgttcgttatgacagagaaaaacagcgcgttatttttatgcttgatggttgtgacgacccacagtgtgaacctgtacagcgttttaaagagaagtacacacgtattaagtaatgaggtggcaagatgagtttattattactaaaaagtcgccctttagtcgttattcctgaattagcggtacgtcttggtttaaatgaggcgatgctgttacagcaaattcaatattggctaactgaaactacttcaggtgttgaatatgacggctcacgctggatttataacacagttgaagagtggaagaatcaatttccttttttctctgaatcaacgattaaacgtgcttttactaatttgaaaaagcagggtgttttacgcattgagcaaatcaataaatcgaaccatgaccgtactaattattatgcgattaactacgatcaccatctgctaactgatggggtcaatatgacccaatcgaacagtgataatacatctaatcgagcagttcaaaatgaccttatcgataagcgcaaattgaaaccgtcaaacagttcaaaatgcactgttctgaacgggtcaaaatggcctgatcttacagagaatacaacagagattacttcagagagtacaacagaaacagatcattcgtcgcagaattctgacgaatccagcgaccagccgaaaaatgattttttaactcgttatcctgaagcagtgatttacagcgctaacttccaaaaatggggcgatgaaggtgatttaaaaacggcgaaatggatgtttggtcgtgttaaaaaactaaatccatctgcgctagagcctacttggtatgactgggcgaacgatattcgtttgatgcgtcaaatcgatgggcgtacccatgagcaaatttgtgccttgttcgattgggccaacaaagactcattctggtaccaaaacattttaagtcctcgtaagttacgtaaacactttgatgaactattcgttcgtagtcaaaagccaaaggatgagctaaaggttcaagttgacaccgttgaacgtgatagtgccttttcccgcttgattggctctcggtctaaacctaaaaaccgcattgaagaaattgcacttgagctagcaggtaaaacaggcattcgtcgtatgagtgagttttcaggtcgccaagcatggagcagcatttggaagcaagcgatagaaatgttacaggagactcagtaatgctaactaaatacattttgttcgttggtttttggtttgtagtgacattattggggttatggggtacttatgcctgagttgatgttaatggatattgtgaaggagagaataatctgcccatttaatcacgtgatgtacggtcacgagtaaaacgtggagagaaatagcatgatgcaaaaaataatggaagtttcagtattacccataatgaatcgtgaattaactatgtcgagtcgagagattgccagtttaacgggaagtaatcattccgatgttaagcgttctgccgataggctttttgttgctcaaattttaacccagccattggctgagttcccttttgaacataacggcaatcaatatactgaatatcgttttaataaaagagactctctggtgttggtagctcgattgtcacctcagttcacagcaaaaatagttgatcgctggcaggaattagaatcaaaaatgcagccagtcattcctcaaacattaccagaagcattgcgattagcagcagacttagcagaagaaaaacaaaaattggaaagtgaactggcgattgcgacacctaaggctcagtttgttgataattatgttttatcccatggttctatgacatttcgacaagtgtgtaaattactgcaggcgaaagaaaccgattttcgttgttttttaattgataagaaaattatgtatcgcttgaataatacgtttacgccttatcaaactcatgtcgatcttggtcgctttgagataaaaacgggaacgaaccaaaaaaataaccacgcttttgcacaatcaaggtttactactaaaggtgtgaagtggattgcagggttatgggctgaatataaagttgaggatgagatttaatgaaactactcttaacgccctatattcagtctgaccttggcgttgttttattgaagcctggagcggagttgcttaagcaatttaaaccacattcgcgcgtgattattagcgatgtaccaaaaagtttagataaatggccttctggggcattaacaggaaatgaacagccattattggataacaagggcattgttgattttttgaataataaaaaagttctccaagctatgggaggattgtcatcgatgaatatgtggataggcagaaatatccattgttgtcagattaacgataagcatgacagttatcatcatcatgaattaacaaccacatggcataaagacggtgtgatacggacttgttggtaccatgataatcatattcgccattcatcagctgaatgggttgctgaattggctcataaaaatcgtattgcttggatggtagatactattcgtagtcgtttgagattagatgatagccattcgctgacgatacctgatttttttgcttttgccgtgatgcataaactggttgataaattacctgatgctatattgcgccgtatcttaaattggcctgataaaactaaagatcgtagagtgcatggcggttttcctgaagctgatattgttccaaatgaagtgacagcactatcagcaatgaatgcgcgtttagatgctataaaacccgttattaatgtgactgtcgatcctgaacctccagcctcatttcttcttaaacctaaaatgtgccgttgggagaatacccaatggcttcaatgggtaaaaacacagccatgttgtgtttgcggacaacaagctgatgatccacatcatatcatcggccatggtatgggaggcatgggaacgaaagctcatgacttattcactattccattatgtcgtcaacatcatgatgaattgcatcatgatccgaaattgtgggaagccacttatggcaatcaaatcgaattgttattttcttttttaaaccgttcattaggaatgggggcattggtttaacgtgtatacggcacggggagtattagtatgagagatatgcaggaagttttatcacgttggggtgcgtggtcagctaatgagggaaatagtatcgattactcatcaattgccgcaggttttaaaggattaattccaagttcaagacgaagccgagagcaatgttctgatgatgatggcttaaaaataaataaagcggtattacatttaaaggtaaataatagttacttgtttcagttggttattatgtactatgtgaagaattatcctttacgctcaatggcttcaaaacttggcatttctcataatgaagtggctaagcgattgcagacagcagaaggatttattgaggggtgtctatcggttgataacgtaaaattagatatggataaaataattagaaaacacagcatttatagtcttgtgtaattacaaaacacaatatattgtgttaataatgattttgatgttacatgacttatctattaaaaacctcgtgagtatagcggggttgtgttttttataggtctacttaagctgacttaccgctaaaaaataaagtttgctatctgaatttttctatggcttaatagcgtcactggtttggaagtacagacctatttatgttagtcagtttaaagttgttcccgtttagcgttatcctcgatacctcttcattgtgaattccttctaattaattcccataagtaaaaatacaaaacaaaccgcctatgccttatggcaaattaaataaattaaaggaaattctatgtctaatacaatgactggtacagtaaaatggtttaacgatgataaaggttttggtttcatcactcctaaagatggaagtaaagatgtatttgtacattactctgcaattcagagtgatgacttcaaatctctgatggaaggccaagaagtttcatttaccatggaaaatggtatgaaaggcccagcagcaggcaacgtggtggctctctaaaggcgctattactattcgcctctattttaaatgcccttgttgtagcggttcacaatatagaacatcacaatttgatgtcacagtgaacaatccacacggcgcaaaatgtatcttttgcaaaagtgtgatgacagcacaaatgagttaagcattaaatagttgaatatacaaaacctcgcttcggcggggttttttgctatctacgatctcatattggttaaagataaaaaatttagattttggggctttaaattgtatagggaggcatagataaaacataactagacttgcctgcttagtttgaactcacaacgaaatgcatactttttcctcataggaaatactgtaagaccgaaaataaaagaggtgttttgctgatattcttactatcagttatgcccaagatataaaatctctcagcttatattgctattaataaatttttcaagaaaattataaagttatatattatgacagaaccttcattaatctcatatccaatcgagtacactatatgtacatacaattgaaaggataaggatttatggccatactcactctccgaaatgttaaaagctattctgctgataaagatgtaaatatagatctaagtaagcctgttacccttatttatggacaaaatggtgcaggaaaatcaacaatttcaagttttttttcaggttttcaacaagaaaaataccagcattgtcattttgcaagtcgtgaaaattttgcttattttgtatttaatcaggaatatatagaacagaagtttcaccaagaaatatatcaacctggtatttttacattgaatgagaagaatgatgacgttaacggtaaaattgaaagtaataagagaagaattactgaaataaacaacttactaaacactttggatacagagataaaaaataaaaatgatgcaaagtctactgttatcgaaaagtactctaaagttatttttaaaaaaactatcaatgatcggcaatcgttagattattttctagatagagctaaacgagtaaataatttttatcaaaaaatgagggaaacttcattaggaattcaaaaatatgagctggtacaacttacagagagactggagttgttacttaatagtgaaggaactcaatatacagagattattgaaccagaggtttatggcctatctgacgaaatgctgactctacttcaaagttcgttgacagcatcgtccgatacaccattttcagccattattcagcagttaggtaacgctgattgggttcatagtggaacaggttatattaaagataatatttgtccattttgtcaacaaaaatttgattctcagcatcttcttcatgaattgacactcatgtttgataaatcttatgaagatgctctggcaacgcttacccacagtcagacagtcatttcccatgaattagacttattggagtcattccatgagcatttacgacaacaccctgtagttagtgatgatcaccaagtttttagtattattaaatctctgcaacaaactttacgtaataatctacaatcactcagacaaaagctactacagccttcgcaatccatacaacctgacgttattacagatatacgtcagcatttgaaccagatactggtaactttaaatagtaacattagagacaataatcagctggcagccaattttagtcaggagcgagctcgcttggcggcagattcctttgcatatcttagagaagtgagtgatccttatttgcgtcaatgtgatcaggaattagcagaaatacaacaacaattgcaagctgagataaatcaagttgatttattgagagatgaagagcgagcactttcggtcgaaactactcatcttatagggcaattatcagttatacagcctacaattgataacattaattataatctgacacaattagggatcaatgatttcaatattatttgtcatgatgagagcttgaaactatatcgcttacatagacaaaaccagccagatgattctgaggtctttaaatctttgagtgaaggcgaaaaaacaatcatatctcttctctatttcctagaatcatgcattggtcacgtacctgatagccagacaatacaacctaaactgattgttattgacgatcctatttccagcctgtcacataactatatttatgaagttgcttcgatgataaaacataaattaattttaccgaagattgcgcaacacattgttatattgacgcataatatatttttctttcaagagattctactttcagtttataaacgactggctcccgaacgtacaacaccaaaggggtgtgcactttatcgcatcattaaaggagaatatagtgattgtatcccattatcgatgcacgacatgctgaatgagtatcaggctttatggcaaaccatacgggatgtccgcgatggaagaagtttaccggtagtattacctaatacaatgcgaaatattcttgagtactatttcagtttttcttgcaaacaggaaaaactggataaagcgctaaataagctagcagttgaatattcagcaggggaatatgactcattttatcgagcaattaaccgtcattcccattctgatggcagaaatatcatggctacaggagtgattaatgtagaaatgtatttccgtttatttcagaaaatttttgaagaaacgaaggattctgatcattacaacacgatgatggggattactgttgagcaaacagaaggttgatgaaattatcacctgcgggcaccacacactcaacggatcgggagcgagcgcatatgcttacgcacatgttctacgcgcccgaaacgaaaacgagtgtaccaacgaactggtacgattttcggtctcatagggctatccttttacaaaccgactactgccggaagtccctgtacccattacaggcatgcaatgatatagagaggattacccgaggtgataaccccttaataatacacagttccataaaataaaccacctttctttgaataatgtagtcattctatgtcttcgtagtgttatacatagttgtaattgtagttgtcctcagaatgaagggttgaagtcagtagaatggcctaaagttattcatcaaaagatagtatgctcaggttgtccttgttgaactaaatacagttttaaatagttttatcttaattcattaatttaattgatataaaagatatataatacaaacaataaaaaaatgccgatacgctaggagtcatatcggcatataaaataaacgcaagaagcaatgtaagtcatgtcgtactaatccgtatcaaacctgtcaatttgatatacctgtaatgataattattatcattaatatattcaaccctaaattaaataaggttactttgtagccttttcatttacaccgaccacagaatcaacatccacttatatcattcacacaagagctgtgagtcggcatcttattgattaaatttttcgttaatttagttgagttttactttaagagagttaggtatggagtatttactttgaagaaggaaatgaaaatctcaatgtgtaatgataagtctcttaaataatagaccccaattatttttggggtcatatattgagattattgaattaatatccctgatattgatttattacgaattaattttcaggtgcaatagcatccaatactcgagcagaataaaccatcgcagcaccagtatttaatgcaacagcaacaccgagtgcttctgcaatttcttcatgactagcacccaactttaaagcggtgtcagcatgtacggcgatacaaccatcacagcgtgttgtgactgcaactgctaatgcgattaattctcttgtttttgcatctaaatgattagtttttttacctgcattggaaagtgcttggtagccagtaaccgtatcaggtgttaattttcctaactcaccaatacgtcccattaattgttttcgatattcattccaattaagcatgatattaaccttattgagttaactgaattattggttgacattatgggatgaaaaaaaagatgatgacatcatcaaacgaatcaatttttagtgaattagtctcatggatacgttgagccaactcttatacctttctcaagggcaattgcaattagatgtgttttgtcaaatgaaaggacatttttccttaccgcatgtttcatctgttgaacatgaaactatttttcacttagttctatcagggcagtgttatgttcagattgaaaaatcagcccctatagttttatccgaaggcacttttttaatgttaaacagaaggcaatcacataccctttggagtggagaacgagatatagaacctcccccttttttgcataaaaataatggcttcttacctgttaagtacacaaaatctgaagatcagactcaacatgttgatttgctttgcgggcgaatggcttatgctaaaggaagcgggttactattattaaatgggtttcctgatatggtagtggcaaatttggtggaaatgccagggctaacagtattgaatttatttagccagttgcttcgagaggaagccattaatgcaaatcaaggggcggctgcgatactaaatgggcttgctcagactttattcgcttttgcattacgtgtttatgggcaaaaaccagatataaactcaagttggttagcattattagctgaacctcggttaagtcgtgtatttaattctatgttaaatgaaccacaaaaagggtggacacttgattctttagctaatgtcgcttcaatgtcacgagcgacttttgtgcgtcaatttaaagcaacggcgaatacgacacctggcgaagttctacaatccattcgtatgctaaaagcactttcattattacaacaaaataaatatacattatcagatatcgcagaaagagtcggataccaatctgaagctgcatttagtaaagcatttaaaagtgtatttaattgcagaccagggcagtggaagaagcaacagagtaaagtgtaaaaatttgcacagagtaaagaagaattattactttcttttgaagtcacttcggtgacttttttgttatctaaagtaaaaacgaaattatatttgcgcttaaattaatcgctgagtaagggaattgagaagcagaagaagttcactattacttaagtgacgggaatgctgttcgagttatcattcccgatttgagtaaaaaaaagccgacgcgctaggagtcatgtcggcataaatcttcgggaaaagtgttaataacgagagcgatcattaactataaagcaatgtatcaatatcggagaaaaaaaaggcacatttacgaataataatcattatcatttaattgtcaattatatgaggtcactacagtgacctttttcttgtctaaatatgatatatatcaataaaaggtgtgtgttatgtcaaaagagataagcgaattacagtttagtcttcactatgcctcagaaacagacagtgaaaagaatacctccgccattttaacggcgaatatccatacgactgatggtgaaactcaacaactgacacaattaatttgcacgacatcttccgcaggtaaaaagcaatatcgaatcggcttgcaaaaaattagtgatgctggtgctccattgctggtggcgattgaatcttattggcgtaaaaacacacaagagagttgtatttattttttagagaaagcaaaacagtttattcaaggacacttacaacaaacgaatacatggatatccatgtacggccttgtgattgtttctaatgcgtcactggaagaacagttgcctgaagatttattaaaagcacttaaagtatcaatacccgcctaattttttaactttctcacactaatcattaacggacactcctcagggggtgactatgcgtatggaaaaattaaccaatgtaacttatggaacagcaggcctaacggccttttttgccagtctctctttatatgaatgggtatttgttatcgggatggcgttcagcatgcttctgggtttagccacttattttatgactcgtcgagaacaacgaaaacgcactcaattatttgaagagcttgttcgtcatgttgacccacaaaacccgaccgaaaccttaaaaaagcttgctgaattaatggtgaaagcgccaaaggatatttaatgtctctcaaacagaaaatagcggcgctaacaacagcaggagcaacagccatcgcgttagtagtaatagcccattttgaaggtgtacgttatgaaccttatcgtgatgtggcaggtgttctaactgtttgttatggacatacaggcaaagacattattcaaggcaagagatacacacaacaagaatgtgatgcgttattacaaatcgattttattaagacacaacagcaagtcgatgcattaatcaaagtatcactcgatgactacaccaaagctgctttatattcctttgcttttaatgtgggtacaaccgcatttgctcgctcaacattactcaagaagctaaacgctggtgatagagcgggtgcctgtgaagaaatgaaacgttggatatatgcaggcggaaaggtctggcgagggcttgtcagtcgtcgagaagcggagtcagcactatgtcatggaaacctttaatcatcattatcagctttatccttgcattactcattacagtcgctggtggcatttatctcttgattgataactcatgtactaaagaccaagtgagtttagaaaagcgctgtcagatagctctctcacatcatcggtactaatcatgaaatacgggaaactctatgccgttattacgatggtaggcatcattgtgggaggctattgggtggttaattggcaagctaataggattaattcattgacagatatcaacaaaaaactggccgtagctcttgaagaacagaagtctattaatactgattatcaagcacgcataatgcggttaaaccaactggatattcaatatacgcaggagttagcgaatgccaagaatgaaattagtcgcttgcgtgatattagcgagcgtcatcctgagcgggtgtatatcaaagccgagtgcccaaaaagcaaaaccacttccgccaccagcttggcttatgcaaccaccgcccgacctactgacaccgctatccgaaattattggttactcagagaacgaattgcagagtcagagcaaatgattaaagggttgcaggattatatcaaacaagaatgcatggaataaaaaagcccagcatgggaggctggacaatactaacaatatattgtttcatatgggtatagttagacttattattataactaaagtaaatatatatgctagtttattgtgtttaattatttatttttatttgattaatagacgtaagataaaaaatagccctatgatttaatgttcatagggcggttaaaatgaagcaaaaagtaaatatcaatcatttccaattatataattattatttctttatgcaatagaatatattgtatttctgttatattagtagattaaaaaatatatttaattgtaatatgtcatatagtatctatttgatgtaagtgtctctttagaggtagatagtattccactctatctgaactcccgatggaataaataacgatgtgtaatcaaaagttagtcgtacttttactcgctgatggatcatgtaaacaagttgatatcacggacatgtactaatgacatgagcataaatactccagatatctatttagataatagtgactgctcgtcatttgtactgggttaggggggcagtagattttgatgaaaaaaaactgtaagagagattacagggctgaaaaacataaatatatttatatatctttttgaaacagaaagcgccgcattgtcgctgtctcctatgttagctatgacctgttttattctcgacagagagcacatagtgagaatcaaaaacaacgaataccaccgttttgttattttcggtcattatcagcaacgtcagctgtaggtagaagaaggggcgtgacgatggagagacatcatctacaaacgtcattcattgattggtgtatacagatagccatcagttaaccactggtggcttttttattgcggaaaatttgtaatggaataaaaaaaatgaaaaaacgcaatgtctatggtggtcgctgggcaaaggtgcgattagcatttcttaatgaacatccactttgcgtcatgtgccaagagcaagggcgcattactgcggccacagtagttgaccacattattccgcatcgtcttaaagaagcgcttgaatcaggtgataaagaacgtatcgcaaaagcccaagccttattctgggacacaaagaacttccaaagcttgtgcgaattgcatcataactccaccaaacaacgtatcgaaaagagtggcaaagtcattggctgtaatgcggatggcattccacttgatcccaattctcattggcatcaataacaccatgaaatacagggtgggggcggggtaaaagttcaaacactttcgccctgattacctagcgccctcatttgtgtgcacaatcgcgaaatgaaaagtttttttctgggaggttccgatggcaggaagacgcccgaaaccgacccacttgaaggtggtcaccggtaatccgggaaaacgaaaactcaacgataaagaaccccaacccaaacgtgaaattccaagcccacccgaacatttaacggattgggggaaaatggcgtgggcaaaattaaccttattactcgatggaatgggcgttttaaccgtggctgacacgctggcattagaacggctgtgtgatatctacgccgatattcttcaattgcgagacaccattgcgattgaaggtcggacatacaccacaaaaacgcaattaggggattttttaattaaagcgaatcctgccgttgccatgttggctgatgcagatcgccgttttaaaagttatttagtcgagtttggtttaacccccgccgctcgttcgaaggtgaagatggatggtggagaagaagaggaagatccgctcaaccaatatttcggttgatcccgcaacacaatacgcgcaagacgtgcatcaaggcaaaatcttagcggggcctgatattcgtcatgcatgtgcacgtcatctcaaagatttaaacgaagccgagcaacgaggattagtctgggatgtcgaggctgtcaaaagggtgatcgattttttcgcgaaagtcttaaagctcaatggcggggaacatgaaggcaaaccgtttattttattgccttggcaatgctttgtgattggctccatttttggctggaaaatgactgatggtacacggcgatttcgcattgtgtacgttgaatcaggtaaaggttcaggaaaatcaccgatggcgggtggcgttgggttgtattgtttagtcgccgacagtgaaccgcgtgctgaagtgtatgcggcagccacgaaaaaagaccaagccatggttttgtttcgtgatgcggtggcaatggttgatcaatctcccgcattaagtcagcggatcaccaaatcaggcggaacaggcaaagagtggaacttggcttatttgaaaacgagttcattctttcgtccgattagttcggatgatgggcaatcagggcctcgtccccattgtgcgttgattgatgaaattcatgagcacaaaaataataccgccgtcgagatgatgcgagcgggtacaaaaggtcggcggcaagccttgatatttatgatcaccaacagtggccatgataaaaccagtgtgtgttatgactatcatgaatacggacgaaaagtcgccgaaggaactatcgaagacgacagtttcttttcctatatttgctcactggatgaaggcgatgatccctttaaggatgagtcttgctgggggaaagccaatccatcactgggctacaccttttctgatcgctatttgcgcgagcaagtgacacaagctcgaggtatgcccgcgaaagaaagcattgtgcgtcggcttaatttttgtcagtgggtggatgccgataatccgtggattaacagtgaaacatggatgcagtgtgaaaacacgttcacattcgatgaccttcaaggtgaagagtgttatggcggactggacttatcgggaaccaaagatttaaccgcattagccttgtattttcctagtctcaaacgtctttatgtcgaattttggacacccaaagacactttattggatagagcgaaaaccgaccgagtgccttacgacttatgggtaaggcaaggttttatgcataccacgccagggaatgcggtgagatatgaatttgtggcagaacgcattgctgaaatggcgatgcacgtcagcatgagagccattgcctttgacccttatcgcattaaataccttgaacccaaactcgatgacgcgggtgtgacggttcctttaactccgcatggacaaggatattacaaagccaaagattcagggctgtggatgccacactctatcgaactgtttgaacagctcattgatgacaagaagattgagatccacaccaatccttgtttgagatggaatgctgcatccgctgtgcttgaggctgaccaaaaagataaccgcgtctttgccaagaaaaaaagcaccggtcgaatcgatggtgtggtggcctctgcaatggcgattggtgctgcggaaggtgaggttgataatggcaaccttgatgattttttctctaacccattgagtatgtgatgacagataaacaatattcaatcgatttgcgcactaatcatggttggtttgcgcgtctggcttccttcttcgttgggggaagactcgtgacacctgaacaaggttcacaatcaggcgttatctcagcgcaaggctcacttggtgattcttctgtaaatgatgagcgaatactccaaatatcaacggtttggcgttgtgttagcttaatttcgacgttaacggcttgtttgccactggatgtgttcgaaacggataaacagggaaatagaaccaaagtcgatttaagtcacccattggctcgattactgcgatattcgcccaatcaatatatgaccgctcaagaattccgagaggcaatgactatgcagctttgcttttatggtaatgctttcgcgttgattgagcgaaataaagtcggtgatgtgatcagcttgctccctctgctgtctgccaatatggatgtacgcatggaggggaagaatattatctataaatatcagcgtgatcatgaatttgcgaaatttaaacaacacgaaatttttcatttaaaagggtttggttttaatgggttagttggattgtcgcctattgcttatgcgtgtaagacagcaagcacggccgttgcgatggaagatcaacaacgtgagttttatgccaatggggctaagtcacctaaaattctaacaacaggcgataaggtactgaataaagagcaacgtagccaacttgaagagaatttcaaagaaattgcgggtggccccgttaaaaaacgattgtggatcttagaagggggatttcaagctcaagatattggtgttagtcctcaagatgcagaaacgatgtcttcccgcaaatttcaagtcagtgaattagcccgtttctttggtgttccaccgcacttagtcggcgatgttgaaaaatcaacaagttggggaacaggtattgagcaacaaaacttaggttttcttcaatataccttacaaccctatatctcccgatgggaaaattgcattgcgcgttggcttctaaaaccccccgaagtggggaaataccatgctgaacataaccttgatggattattgcgaggcgattccacttcacgcgccgcgtttatgaaagcgatgggagaatcggggctaagaactattaatgaaatgcgacggctcgataattatcctcctcttgaaggtggagatgtcgcttaccggcaagcacaatatttaccgattaaccaactcaataaagagcctcacgaaagtggggcttaattatttatgggggttcaatgcctgatatcagaaaaacactgaattttgatgaagcggaaatcaaatttacgggtgatggcacacaaggcgttttcgaaggttatgcctctgtatttagtcatcaagattccgatggtgacattattttacccggtgcgtttaagcatgttttagataagcaaaaacaaaaagtcgctatgttttataaccatcgagtctgggaacttcctgtggggaaatgggagtacatggaggaagatcaaaaaggattacgtgtaagaggacaactaacacccggtcatagtgcggctcaagatctaaaagcggcaatgaagcatggcacggttgacgggctttctatcggattcggttgtctgcgtaatgattttgagcggacaccttcaggccgtatttttaaaaatatctctctgttacgtgaaatcagtatttgtacatttcccgctaatgaccaagcacaggtttcatcactcaagagcatcgatgggttattaacgatccgagatattgaggattggctgagagagtcagccggtttatcaaaatcagaagcagtcggttttatttcccgcttcaaatccgctattcggagtgagtccgatgacactcaacaatccctagtcgcatccattgttaaccaaattaatgcatttaatctgaaaggatagaatatgtctgacttagctattatccaagaagccatcgaaggatcacaaaaaaaggtgcaagagctcttcgatgcacagaagaaagaaattgaagctactggcgtagtttcaaagcaattacaaacagatttagccttagtccaagaggaattaaaaaaagccggtgaacgtctgtttgatttagagcagaaaggggcaacgagtgctgatgatcctaatgcgaaaaaagatttttctgaacgagcagcagaagcgctgacaaaatcatggaatgggagtcaggcttcttatgaagtgaaaacttttaataaatcattaggcagtgatgcgagttcagccggtgttctcattcagccgatgcaagtaccgggtattattatgccgggtatgcgtcgtttagttatccgcgatttattagcacaaggtcgtatttccagtaactcactggaatatgtacgcgaaaaattgtttaccaatagcgcggcacccgtgaaagaaaaggcacagaaaccagaatctaatctgacttttgaaaaacaaacggcaaatgtgatcactattgctcattggatccaagcgtctcgccaagtgatggatgatgcagtgcagttacagtcttacgttaataatcgcttattgtatggcttagcattagtggaagaggagcaattactcaatggtgatggtacagcggataatttgacggggattaatcatgttgccactgcctatgataccacgttgagtgctactggcgacacgcatgctgacttgattgctcatgccatttatcaggtaacagaatctgaatttagtgcctctggtattattttaaatcctcgtgattggcatgccattgcgttaatgaaagataaagaagggcgttatattttcggtggcccacaagcgtttacttcaaatgtaatgtggggattacctgttgttcccacaaaagcacaaaaacaaggtgagtttactgttggtgcatttgatttggcgtctcaagtatgggatcgaatgaatgcggttatcgaagtgagtcgagaagatcgtgataactttgtgaagaatatgctgaccattttgtgtgaagaacgtttagccttagctcattatcgccctcaagccttaattaaagggactttcccaacgtctggaagaagtgcttaagtaataggtcggggtaggtaactatcccgtattacatcatgaatatcttagatgtcattcctctttctttattaaaacagcatctcgaatacagcggtgatgatcgtgatgagcagattatattttatgcacaaagcgcattaaattattgtttgagatggtgtgatgaaccagcatggaaatcacccgatgatatcccttatgaagtgaaatcggcaatgctcttagtgctgggggatatgtttgaacatcgaaccagccaaagtgaaattccgttatatgaaaataaagcagtagaacgattgttactgctttgtcgaaattggcgaggtagttaatggatccgggacgattacgccacactattcatattcaaaaatcagtattagcgcccgatgccatcagtggcaatgatgtgatttggacggatcatgcgacaaaagtacgtgcagcgatcatgccttatcaagggcgggaatattttcaagcccagcaagtacaaagtgaggccacaacgcgaattattattcgctatatcgctgacattgatacttcgatgcgtattgtatggggtaagcgaatatttaatattatttcgattattgacccttatgagcgtcatcgtgagcttcaattgatgtgcaaagagggcgtgaatgatgggtgagattaaaatcagtggattgtctgaactcgctcaacgaatgcaagacattgcccgtaaaaccagaaatcaaagtgcgcgtaaggcgatgaatgcaggcgcttcggcgttaaagcaggaaatcaaacatcgagtgcctattcttaaggaaacggtgcctcatcgacgcaaaggcactatcaagcgcaatattcgttctaaaacgaaagtacaacgcaatgggcaagtcaaaacgcgcatttgggtgaaatcattatcgggtaaaaaggtgtctgcctttaaacaggcaacggggaaaagtgcagcattgaacccgaatgatccgttttattggtggtttgttgagtttggcaccgccaagatgcccgcacaaccgtttatgcgccccagctttgaagcgaaaaaggaagcgacggctaaagtgatagttcaaacactcaaagaggacattgaaaaagcaaggtagagatcatgatacagcaattaaaagagaccctttcaccgctggtcgatggaagggttttttttcaggtattacccgaaggcaaagggcattatcccgccattgtgatccagtttgccagcatcacgcctaacagtgcgctggaggatacggatttagataactatcgcgtacaactcgatgtgtatgcgctccagccacaaccccttatggtcttgcgtaaaaaaatcgaggctcagattgttgcggaaattccattcgcacaacgggtgaatgcggtctttgggtatgaagcggatgtcaaattgcatcggcttgttcttgaattaatgatttcatcagataaataaggaatggatatgacaaagccaaagaatcataaagcgacgcctttcctcggcacgaagatctttgtgcaaacaggcttaggagaggcgatgaccgtgacggaagcgacgttatcacccgcaaccattaccatcgccaataataaactgaaagcggatgacatgattatgttatcgggtttaggggagttagatgggcgttttcctattgcacaggttgatggcaataaagtgaccttgtgtgaggaagtggattggggtgataaaacgttaccctcagattttgcaaacgccaaagcacaacgcattcaatggtctaataatttctgtgcggtaaaaagtttcagcaaagacggttcgacaaccgaacaaattgatgtcaccactatttgcagtgatggcaaagaatatgaatccggtgatacggaatacggctcaattaaattgaccttcttcttacgttatagctccagtgatgtgcagcgactcttgcgtaaatatgaaaacagcaaagaaaaattcgcagtgaaaatggtcttaacgcgagatgaaggctccatgttttattacggctccgtcgaaacaggcatgaacattgatggcagtgtggggcaaatgatggattcggggatctcgattaaattgtctggccgtgattatttgaatgcgaagaaataacacttaactcacctctcttattatttctcttctcccttctcgataaaaaatcttaggagtgattatgtctaacgcgttattgcgtgaattagtgttaaaccaagcactgaaagtgacaccttttacttatttagacaacaccttttacgtcaaagagctggatgttggcaccatgaattacattcagcgcaaacttcgccaaattaaaatcaagcttgctgaggcgcaggacatttatttagacgaagacgatcccgaacaatttaatgaggcgataaatcgtgtctacgatgaatacgatgtcgccagaatgttggcctttaagttgtgtgatgaaaaaggagaactgctttttgatgctgaaaatgaagcagatttaaaaggtcttaatcgtctagggcaagggttctctaatgcggtgtttacagccgaagcggggaacagcgaaaaaaactcggagaccgacggcaattccaactgatattgtcgttggcattgggaaaaacgctcgcggaaatcgagcaaatgcccgaaagccacttgtgtgaatatgaagctttttatcgcaaacaaccctttggtttatggcgagaggattatcggatggcacaagtggcgcatcttcttgcgatgataaatcgtgatccgaaaacgtctccgccggaattgatggattttatgccgatgtggaagaagaaaatcacggaagaggaggtgtgggataatgtcactgagagtgtattagctaatcgatagccccacatctgtggggcttaatcgttaaccaccgcgagacattttctcaatttttttatccgtattgtattgagaaagggcataaaccgaccagatagccgcagggatccatccaattaaggtgatttgtaggataaggcagaagatgccagcaaatgggcgaccaatcgtgaaaaattgtaaccaaggtagtaataacgccagaataagtctcataaaaccccctctattattcgaaatttcagtttgtcaataattaaatcaatagcaaataacaaggaatattgcatttattcagggtgaaagtttgcttttgtagtgttcataccaaggattgaatttatggcgggagcattaggtagattaaatattgatttgacgttgaatacggcaaatttcacaaatgcgatcaaccgtagccagcgccaaacagaacaatttgggcaaagtattcgcgtcagccttcaagctatcaccgtgcaacaagagcgaatggtatcgcaaaccgcaaaatcctcggcgctttttgcccgttttgcgagtgtcaccgcaagtgcattatccattcatcaagtcattaattatgctgatagttggacggaattacagaaccgcttaaaactggtgacagaaagttctgtcgagttaaataaagccacacaagcggtctatgatattgcccaaaaaacctatcaatcattggatgccacagcacaggtttatcaacgttttgcagataatgccgatcgcttaggcttaagtcagcaaaaagtggccgaactcacggaaactgtctcaaaagccgtggcgatttcaggcgcgagtgcaaccgcagcccaagcggcattaacccaatttggtcaagcattagcctcggggcagttacgtggcgaagagctaaattcagtgatggagcaaacccctgcgttagcgaaagccatcgctgacggaatgggtgccagtgtgggcgaattaaggaagaaagcccaagacggtgaaatgacgattgagaaagtcattcaagccttagaacgtgcagctgacagtgtggataaaaaatttgctaccagcgtgacaacggttagccaaggtttcaccaatcttcaatcggcgatgacaaaatttattggtgaagcgaatcaaggtactggtgcgactcagcttttaaccatagggatggctactcttgccgataatctatcgttagtggctaaagtggttgaaggaattgctgtcacggcattggtagcaaaactctctcaatggacgaaagctacttatctgaaaaatcaggcaacattgaatgaggccaaagccacattacagagtgcggaggcaaacagtgtggcagcaaccagtgccgtgaggaaggcatgggcggataaagaagctgctacatcggcactcaatagagccaaaatggaatatcaagttgctagaggcactaatgctgaaaaaatcgcactcgataaccttatcgccacaaaatcactcgcaagaacagcctctctaaattatacacaagcattaaccgccgaaaacgtcgctcaacgtgcattaacgaccgctcggcgtcaatcaacagtggcagggcgagcacttaacagtgttatgggattcgcgggtggccctattggattagtgttgacgggtgttgcggcattgggcatgggattgtatgagtacagcgaaaatgtcaaacaagccaagttagaatcgattgaatttgctaattcccttgatacatcaacagaagcgttaaacaaaatgagcaatgccacgttagtggcgaatttaagcaaagtttcatcgggtattaacgcgcaattggagaaagtcgaggagcttaaacaacaggtcatttccttacaaggtctatcaaaatacagcgttgagagtgaaaaggcgtttgctgaacaaggtgtgggggatttataccttaaacgagtggctgaaaagcaaaaagagcttgatgctgcgatggggatatatgccgagcaagttaataacttagagcgtcagcgagccaatatgcaaaatatgttggcgacactcaaagaaaaagtaggtgatcaagcccctgaatatagacgttatgccactgagttacaaaatgttgatgccgttatcaattcacttaaggcgagcttaaagagcttaggcattgaatatgaatcactcattaatatcacgcttcaggcgacaaatagccaagtgaatgccgccacggcgattgctaaacagattgatgaatcgattgaaaaatcgcaacgttcagtggcaaaagcacaagccacagggaaggcattagcgaaattaaatgcagaagatgtattggcctcacgcaaaattacaccagatatgcaaggctacgataaagccttacaagcggaaattgaggcacaactggcattgcaagccaaacggacgtataagcccagccacaaatcaaccattgattatgccaagcaatacaccaaaatcttaacggaattagaggaaaaacaagcctcactgattgcagatggacaaagtattcagctgtatggcactacctcttcctttaatgaatacacatccgcattagccgatatcaaacagaataaaaacaagtttgatgccatcttaaaaatcgatcccaaagcgattgagacgataaaagaaaaagcgaaagccattgatgatctagcgcgtgccaactcggttgcgcaatttgcttatgatcgcggtaaagaaattgagcagatgcaatttgaaaccaccttgataggaaagtcacgcgcagagcaagaaaggcttaatgcccttcgtcagattgatgtgctgtatcagcaagccagtgtggatttaggcgaaaaagagttggcgaacttacaacgcaatgtcgaactcactaaacagcagattgaggaagaactgaggaagcgagaggccatgaaaggtgatccgatggcgggattaaaacaaggcttatcggatttcagtgagtcggccatgaatgtgatggagaacgtcagaaacgtcactaccaatgcccttaataatatgtctgatgcattagccgattttgctttaacgggtaaaggaagctttaaagattttgccaatgcggtgatctccgatatcactcgaatggtgatgaaaatgttggttttcaaagccattgaagcaggcgggcaggcaatgggttttgatatgggatggatgagcaaagggcatgcttacggtggttatacggggcatggaggaaaatttgagcctaaaggaattgtgcacggtggtgagtttgtttttaccaaagaagcgacggctaaattaggtgtcggtaatctctatcgcttaatgcatgctgcgcaaggttatgcttcggggggctttgtgggggcagtcgcaggacgaatacccattacaccccaaccgacgttagctcgtgcaggcggtgtgcaaatgacggtcgtgaatcatattacggtgacgggaaatggtgacgctgtacttgcgcaggcaatgaaggaagccgcacaacaagggacagaagcaggcgcacagaaagctcacgcgatgatgttacaagactttcaaagtaatggcgcagcacgcagaacattaggagtttaaatgtctattcttgaatggccaaaagcggtgatccccacacaggaaaactggcaattattgagtaacagcaaaacctttacctcgccatttaatggaagtagccagacggtgcgctttccgggaagtcgttggcgttgtgagctgacatttaataatttaaatgaagagaaatcgcgccagttagaagcgctggtggcttcattggatgggatgtcggggcgagtcaaaatagccagttggataagaaaagggcgttatgggtatggttcgcctcgtattgcaataccaagccaattaggtcatcggctagaaacaaaggactggaagcgcaatatgcgcgtgttacagcaaggggatcgtttaactgtgggcaatgaactcaaaatggtggtggctgatgtggtcagtgataatcaggggtatgccagtatccctatttcaccgatgttaagaacgtcacctaccgtcaatgaaatgctcgaggttgagcgtccttttggagtttttcggcttgttgataatgaacagggtaaatttcagcatcgtcgcttggggtatacccatatcacgttattttttgaggaggtgttgtactaatgcaatatcatccattttctgacgccatggtcaatgcgattaatgagggggcttatatcgttttagccgccagactcgatttgaaatcaggcgtcacctgtgcgcataccggtgttgggcaactgattattgcaggggaaacttatttaggcgtaggaagtttaggcgaaatcagtcagctaaaagaaaataagacaaccagccctccgcaattacagcttaaattagccggttttgataaatcgctggtgggaatggtgatgaatgagcaaagtcgaggacgagaagttcgattgatgatggtcgccatcggtgaagagggaaaaccgcttcttgctgaagtcttatttgtcggacaaatcacatctatcaatgtggtgtctggcgaagaaaatgccgtatgtgttaatgtttctaatcgattcgagcgatggtcaatcgggttacccgatagattcaccgatgagtcgtggtcatctcgaagacaaggtgatcgtatctttcgttatgttgctcaaatggctgaacgggcaatttattggggcagcaagaaagatgcacctgcatttatttataaataatcttattgtcttgttaaacccacttttgtgggttttttgctatttaaggtcagtacatgaaacaacccaactggacacttaaattacctgaaaccataagggcggcgatgagtcgccctttttcatggggtgaatttgattgttgtatttttgcctcggaatgtatttacgcacaatgcggtttctctccaataaggccttatctcaatcactataaaaccaaagccgaagccttcaacctgctcaaatccaaatttggctccttagagaaagccgtatcacgctatttcaagtccattgagattgagcgggttcagcgtggtgacctcgtactgttcaaaggtgaggacggtgacagtttagccgtggtctgggcggggcattattggggcgtaaccctacaaggtgtgaagccagtgcagattaacccaatcaaagcgtggagagtggaataatggggggaagtggtggattaatttcaaaagtcgtgggtgcaggcttaatgattgctgggctatttaccggaggcgtcacctcggcgatgggtatggcactgatggcagcaggcgttgcggttcaagtcgcgggttcgcttatctttaagcctaaactgccttccatgaattatcgagataccagtgaacgcaaacagatgttacgttcatcgtctgcgcctgaaaccgtaattgtcggaaaaacagtgatatcgggtttgcttttctttgcagaggaagaaaatggcgaacaagatgaaaatgaaaaaatcacactggcattggcgcttgctggacaccccatagagaaaatcgggaagatttggttaggagatgatctcattgagacgtttggtgataaagcctcatgggaattacataacgatagggaaaatgccgatccctttatgcttaaaaattgcccgtcatggaaagaggatatgattggtcgaggtctagcgtggttacgtgtgacactcacgtttgaccaagaaaaattcccttatggattacccaatgtgaaatgtgaagtctggggaaaacatctgtttgatcctcgcactgggcaaactgtgtggagtaacaatggtgccttagtcattttggattattaccgccattatttaaaagtacctgatacggatattgattttgacagctttaaacaggcagccgatttatgtgatgaaaaagtgagtctaccagaaggcggatttgagtcgcgatatacccttaatggcgcctatgacttaaatgagagtccatccagtgttttggaggcgatgcacaaatgcatcaacgcggaaccgacattcaccgcaggaaaacacggtatccaaatcggtgcttattatgggcctgcaataaaaaccatcactgaatcacaattgattggcactgtcacgtgtacccctgaaacaggtttaaaagacgcgaccaatgcggtgtatggcacgtttattgatgccgaacagttgtacacaaaaaccgacttcacgcctgtgattgtggacgaatgggtgaaagaggatggcttagaaattcgagagaatatcgactatcgttttgtcaccagcccttatcaagcccaacgattagctcgccaatatctccgcaaaaagaaagccggaagacgggttcaactcacgatgaacttagacggctatgcttatcgtccgggggaagttgtgcttttagaattaccggctttggggattagtgggcttgaatttcgtattgctgaatggtcttttcatacattagacggtgtggctttaacgttggaagaggatggtgcctatttatatgaagatgtgattggcaaaccgtttgagcgtccgccatttgtgagtttatccactggcggtgttgcttcccctattaatcttacctttgttccacttgcagtcagtgacatcgtacaaggtacactttcttggcagaatgttgctactgatgtgcgctataacaccgtcactattcttcaagaaggcaacgttattcaatctattcaggtaccagctgaacgtgttgatattaacggattagcgcgagggatttatcgtgttgaagttagagcgacaaatgtggccggcgcaatgtcggcacccgctatcagtgactttgccattcaagcaccaccacctcctgagcatattgatgttacttctggcttatttaatctgaccattgcaccgaaacaaggcgatagcgctgtctttggttatacctttgagttttggtttagtgaggaaaaactcgccaatctctctgaaaatgaagtgatcactaaaacaaacaaagttggccaagggaatttctggacgcaagagaatttaaaagcagggcatacgtattatttttatgttcgaacaatcaacagctatggcaaatcactttttgtggaggcttctggtgtttgctcagctcaaaccgatttaattcttgaagaattagcggggcaaatcagccgagaccaactcgcacaagacttattgggtgagataaatagcaaagctgaccaatcagccgttgttgagttaaatacgcaagtgaaagcgaaccatgatgcgattttagcggagcaagttgcacgaggagcagtaattaaccaagagcaacaagctcgcgctgaagctgataaagcggaggctcaacaacgccaattcttagctacacaacttcgtggtgattatacaggcaatgatttatcgaaagtcaccgcaggacttatctccgctgagaagcaagcgcgagttacaggtgaccaagcagaagcgaaagcccgacaatcattggaaacacggatgaatgggaatgtttccgtgattaataaatcattaggaaccctcacctcgaaacagcaagcacaaacacaagagatttcaacgctcaattcaaatcttaaggggaaagctgatagtagtgcggttaatgcgttaaatacgcgggtgtcgaatatcgatggaaaaatgacggctaccgctcagcaagtcactcgcctagaaagccaagtgggttcaagttcagccaaaatcgagcagacctcaaaagtggtcactgatttaaatggcaaaatctccgcatcatggacaatgaaagtccagcaggatagcaaagggaataaagtcattaccggcattggcttagggtttaatgcacaaggaaatagccaatttctggtcaatgcccaaaactttgcggtgatatcgtcattaaacggcaaagtggtgacaccgtttgtcgtgaagaatggacaggtggttattcatgaagccttaatggataaagcgtggatacagaaactagtggtactcgattattttaaatcatcgggatttgataaagggaatggctttttattggatgcaaaaaacaatattttccgctttacgggtggtaatggggcattaaatatcaccaataatcaattggtcgtcaaagatgagaaaaaacgccttgtgatgaaaatcggttacctagggaattgatttatgtatggtcttgaaatttttcctgttgaaggcggtaaaccttaccgtttaacgcgtgatacgcaaattctctgttatttaacctcttatcagatagggccagaagattggccccattatcgacaaccgaaaaaaacacggagcaaagtcatccatgaagccatggggtatgaggcgttcgccatcccgagagtggcttctgtgtatatggcggtgaatgattatgcgtattttcagggaataacgcatatccgaatggaagggcctgtattacgttatgagtatgtttatgacaatgttcaggttcaagacccacagatggccaaaagagccaatatggtggtcgatatttatggtatcccgttaccggatagtacaaaaccaacgtatggtgtggagtggtatggggcctttcagggatttcgaagtgcgattacacgtaatacacaaatgacttattgtgtgtttcgacaaaaaatccaccttgaaggcgggcgctattggtctttgccaacaacattaccgcatttagataagtgtgttatgttttatcatgccaccaaccctcaagcggaagtgagctatttagcgcataaaaagcaattatacagttcagcccaaacagacatttatgtgtgtgttttcgtttcaggaatggttttgaccccgaagagacgttggggtttatcactgtacagtgaagatggaacactggtctttaatacggactatttgccttttacccgaggaaaatcaatggaattgttattacgggaggggagtgtagagactccatatagcttgcctttagtctgtgcaacaagtcagtttgtgaatgcgtcttatcaggatgaccctattgattgggccaagcgtaatacggggatacgttttcggggaaaacagatttttgtgagtgaacggatacgtgatgctcatcggcaacatcatgtagagcaacgtattcccttttatgtcctcaatggctcactttatttttaaatctttctgcattcacattaataatgtgatgaatttcaaatattattacgagtgggactctcagcacggtgaactggaagggtatcgtgccagtgacggccaacatatcgaggcttttgacccgaaaacgggtaagcaattgaagcctgctgatcctaaacgtaatatcaaaaaatgcctgtaactagagataacattatgggattgaaattaagaatttattggttcaataagaaaacaaaggacttttctggtgaggaatattctaaagatctcggtgatgacgatttccttattgaggaaacaattagccctaaaaatgagaatattatcaataatggtgagtttgaactgaaaaaagaatggattaatactattcaaaaacatgtaactcacaaaattgaaccggataaatatacttatttcattgcatttgattaccagtgataactggtaattaaaatttttcaagaatgaaataaaaacgagtacccgttgcttacgaatgagtggcgggtatttattcacaacagtatcgagcatgagatggaagaagtgctgaaagtggaagaggaacgcagacaaaaagaagaggagatgaagtctcaatttgggctgggtgagaatggaaggctgttatgttagatatattataatgaaatgaattttgggtttcattattgtttattttatttacacttttatagtgaaaatattcatatattatatataaatatcattaatatattaccttccccattcttgaaatggggtttctttattatcaataaattctatcaaaatcttcatcattactatcgaaaaaacaatcgatacgttctgatttatttgaaattctatgacactttttcaatgtgtttgcatttctattatgtatattttggtactgaattttttcgctcggggatagttctgaataaataacccgttcttgacatccaatggagaatagtgatgttagtaataataaagaatatttcatgtttttgcttcttttaaattttaataataattcagttaaagatattaatgatatatagtaattgttaatattgtgttttgcaagtttttaaattaaaagtataattgattttattttttacttaccagtacgttgcttacctttatcttacattcttgaacagctttaaataaactattcatgtatttattagcttcatccgatcctcttatgtattcttttgtgtataataaatcttctttttttatatcttttaattgttcttcatataagcaattacacatctcattcgtataaatggcatcacttatgcacctttcgatatagttattattggcataacaattactaattatcatatatgataatatgatgttaatgaaatatgttttcataaattacctttattgtactatgagttataattactgttatcgattatatcatttaagaatggtaacaataaataatatttttttataacggaataagatgttaattcttaacgagggatgtgaatatataaaatattaatgttttttattgtgagtttattttaatattatgttgtgcaaatgggctatagatataggtggggtttattccaatacttttaattaataaattaatggggtgattaattctaatttatatattttaactatataatatatgcgaatacatcgttatgataaatatctcaaaaatatagattatgattttctaataattatttagagtgaataattattagcttcaatataatgctttttattgcctagattctaatgaacagtatagaatactacagatctttaggtgatgaaattttatcaaaccatgtattaagtatttctcgcttttctcgtaagtaatcatatctatcataatgcttttgggaaacaccaggtcttttgtgattttgtaccatattcttaattcagaacttattcccattttcctagctaatgtttcgaatactcactaagtcatgtttacagccctaattagtggttatcaaaaccaataaaagcattatggtaatcaactagttataaaaatgcataatcactgtcttttaagtctattaagagtaaatatgccttaataaacaaatagttaataatggctgatttatataatgctacgccacatgggttggacagaagctgctgacttaatcattaaaggtatggaaggcgcgatcgaagctaagaccgttacttatgatttcgaacgtctaatggacggcgctaaattgctgaaatgtagcgagttcggtgacgcgattattaaacatatgtaatataattagcgttgcgaattgattacgggaacttaagggttcccgttttttattgtcaattttctaacattactttttattttatgtctattatttgcatattttggagatgaaaataataagctggttgttaaattgggctgcttggggtagtcgaattctttttcatgaaaaggtcaataaaatgccatggggattaacaatttataatgataaagaggagggaacataaccagctcattatttgtgctcgattttattaaaattacaggagatggaagcaaataatacactgttcctagtggattaacgttgtatgcaacagcaataggaaggcatagtattcgcacttctgtttcaggcaaataccgtatattggaaatccaatataacctcgccatcgatggatggcattattattgtggggctaaaataaatcagtaaatatggtttgaaagtatttaatggaaaaatgcagagtatttaagcacattaggatcatttgtttttttaaattcattaataatattaaaaaaggaaattataatacaggaataaaagaaagggatgatcctccaatggtttttttcaagatgtacatcaatacaatctattatctctgattcaatttggttataagaaaggatggatattggaacattacatgttaataaaacggtgatatgctttttgagtgttacttattcgtcagagcctcatattataataaagctaaacatcaaaaatgggatattcaaatatttaataataaccagttgcttcaagtctcaggagcaagaccattgagaattcagtccatcacagggttttctgatggtagacctattggtaatgagttgtcggtaggtgttcaatgcgcttcactgtgtcgagttgtcggatattactccacaccaacatctccttatcaacatgccgttattgaagtgggaagttgcggttcaggcactaaaattgtaccaatgcgatggcaattaacggtattaccggggcctagtgcaaattcaagtacggacgatgtggtacagtatattgatattaaggattatcaataaggaatcagttgataaaataatagactaattttccatttaattatatatgagcaatcaattttgactttagttatctaaaaatgataattttatcaggttataattttgttacttatatgattgttttgttgtgtattatttttatttctaaaaatttttatggttgatatagtacttaatatttatattaattgtgttaatataaatattaattttttatatggttgatgaaaaaatgaataaagataatgagtatggagtaatatttaattcttctgattcaatggatgattttgatagattggctaaatacattattatttatccagatagggataattttaatgatttcggtttggatagtaaggtttttataaggattgtaaatgaagaagagaaacttaatgtcaatcttccagggtttattgggttcattaataaagaaaatgatttaaatggtaaatattttctaaaaaatataattaaagatgggaaggttgatttcataaaaaataataaaaaaaatccatattatttttttaccatgctaagagaattaaaatattatagaagtttagttgaaatttttggttcaaaagaggcaaataaaattttgctatctattaatgatatttcattgtcagttagtgatattgcagctaaaaaatatagaaatatagctttagaaacagaaatatttaataaatcatttattagaaattcagaatcatattttacatttaaaaattcatcttttattctaaagggcttaagttatgagaaaggaaatttattatccacaaatataacattatcacctaaaaatgaatcagaaccagtattaagttttgactttgattatcatgatgagttacctaaaagagtttgtgttttgattggtgagaatggagttggaaagagtcaaacattgagaagaatttgtatggctgctatacgtggaaataaagatatctttgaatatgttgataattccaatagaaggatattgattaataggcttttggcgttttctcctacgaatgaaagtaaatctaattttccttcagataaaaatattaaatctaaaatatggtatagacgtttttcattgaatcgggtatctaatagaaaaaacattgctaatactaatgatttgattattcagctagctagaaatgaagaaaatattagagaattaaatcggtttgatatattcaaaaatgctatttctaatttgaatgattataaggaattagcgttacctttaaaagaaaacacagaacaaccgatatatattaaagaactaaataattattatggtgaggagcaaaaattattaaattttcgctccattgatatatctaaagatccagtaagatatatagatggtcaatcatatcctttaagtagtggtgaaatatcatttataagattttgtgcgcaaatatgcacaaatattgagaatggaacattggtgctcttagatgaacctgaaactcatttacatccagcttttataaataagttctttgctatattagatactttattgaccttaacaggttctgctgcaattattgctacccattccgtatattttgtgcgtgaagtttttaaagaacaagttattgttttacgtaaaaatgaaaatggtaacttagagttagaaaaaccaaggctgagtacatttggtgcaaatataggtaatatatcttattttgtatttggtgaaagtgaacctacggatgttctattaagagttaaaaataaaataatagaggacaagatgacatggcctgaagtatataataaatataaagatgatttttctataagcgttttaatgcaattgaggaatgaaatagaaggataattgatatgaataaaattaatagacctaaattttgtgactcaatagcaataactaatctggtatctaatacttcactaggtcaccatggtagtataatgaattgtttaccattattaaaatcggcctacaaagagtatatccgtaaagcaggtatcccggataaaaataattatactgcattaacaaaagcggctggagatgcactaatatattattattcacatccaccaaagagtcataatgaaataaataatattagaaaaaaagatagtaattcattatgtccgatgtgtggttcgatgcatcgaggtacgttagatcatgtcttacctaaaaataattttccagagtttgctattttttctaggaatttagttcctgcttgtaaatgtaattttgttaaaggaaaaacatccacaaatggagctggagcaagaatacttcatccttattatgataaaattttgggtaaaaggcttatttctgcaaaatttgattcattaagtcgtattccaacaatagatataaaaatacttttatctaataaccatcctttatatcagtcagttgtatttcatgttgatgaaatagtcaaaaaaaatgacattttgggatatctttctgaacagtgggagatgttttatttacatcccgaatctgtaataaggggacttactccaagacttacagagccagctaattattttaaattacttaagaaagaattacttcttttggataaaaagcacaaaggtaaaaataattggaattctgtttttgtttcgggtctatatagtaggactatttgtacttgggttttaactgaacttcaatcgtctaatagagatactgacggtattttaatttaaatctattcatatagttagtaaattaagctttaaaaaattatttataagtgaagtaagaaggtttatttttagtaaaccttctttatttggaagttataatgtgtattattgagtaattatcttatttttttagatgactctatatcattttttggatttttgtatagattattcttatatgaatttattgaaaatactctccaaaaccaccctaacccaaactaaaaatcaaccagttacatacaaaccaagatcacataaaaaaagattgtcaccaccaataattataatttatttaataagttacgaaattattatgggtataatgttacgccatatgggttggacagaagccgctgactttatcattaaaggtatggacggcgctaaattgctgaaatgtagcgagtttggtgatgcaattatcaaacatatgtaattgttgaattgataaatagttagcggtagcttattagttcccgttttttattaatgtttttttacaataataaataacatactcatatagagaattgtatttaaatagccaaagttagcaaaagtgaataaatctcaacagacattaagctaaatataaaatatgagtgaataaacaataaggtatttattttggtgaaaaatataacagaaaataatctgcaaatggcatgataaagaagccgaagtttatcaattgcagattatctgatgcttaaaaatataaccaaataaaaattaacaggtaatggttatccactcttttccacgagtattattataacgatcggtttgtaaacgtgtggtatggcctaataaggcttgggtatcaataccttgttttcggtataaacgttcagataaagaacgttgctcatgaaatgttgcaggtgttccttctccccaatcaatatctgttttatttctcgcctttttaaaattagtcgttaacgtatttgcagtaacttgttcgccacgtttagattgtgaagtagttcgatgataatgaactaaataatggcttacaatacgatcacgacatcgttcaataacttctttaagagatacattaatagcttgattacgtaaagaaagtggtattgctacttttgatcctgttttactttgtatgatgtgcaaatgatcatcccaaatatcttgaaaacgcatacgtgagatatcactaactcgctgacccgtcacaatggcaagtagcattgcatttcccatataacgatgttgtttatcggcaatatcataaattttatgccattcatctagagtgagtctttgtcgcctgatccgtgttcttggccttttcgttgctagagcagggttatatccgggaggaacttctccagcatgttgcgcttctttaaaaatatcactaaaaaccgatcttacaacttgagccatgcgcatttggcctattgctttgtattcatcaataatactgactagatcacgagtacctatatttgctaatggatataaagccaatttttgacgcatcagatctataggttttttcttttgtttatatgtagcaagttttatctcaccttgtgataaacgttctttttgaatattccaatagcgatctaaccatgtagaaacagagatagattgatctttcatagtagcaactctatcaccaatgattaaaatttggcgtgttctttgttctgctatacggttattggcttcaagagctatctgtttagcttgtgcttcatcatctcctaatgaatgaaattttcctgaaattgggtgacggtatcgccaatatatctttttcatccttggatgatatattgaatataaattgggtatatcaatattctttttacgaggtcgtccgctcatcttttaatattttccttaatatagggtcatcgaatgttttgatggaaggagtggcaactataccaactaaatcagcatcttctttgactcgccataatcggccctctttccttgcagggggacaaaaataacctaatcgtgcatatttatttaatgttgttagagaaggtgggttacttttatatcgtttatccgaccattcctttaatgttaatactttcataatacatccttgcataataaaaattagttaataagtattaatttacatttaaataaaaaataatgaaatttatttgataactaataaatagcattattttctatcgaatatatatttccttttgcattattaataagagagatgttcgttaatagataattattgtacctgatgtttatattattacaataaccatgtaatgggaagtacatattgagctgaaatgagccagctcaataaactaaaataaagaagattagagagtctgaataatttgtattacataaccaataatttgataatcattagtaaataatattggggtaaaggctgtatttaatgagattaaataaaattgtggtggttcatggataaactttttaataacgatgtcattagtaataatatttttagcgataattatttttccatataactctatcttattcttgaatgatggttcgataataacggttgaacctttagggattgaaggaagtgaataggggtttgtcatagattcgccttggtaaattaacccatatgcttgttcagatacgggtactgttgcacagcaccaatgctgaatatcgcttaatcttaatgtatcgtaacgtgctttccaatcagctgcttgttcaagcgtgataatgggtattttcttaatattcactgtcttgcgagttataattaatgcatctgcttctgatgagtttcccccgtaaagtaaccattcaggagagacttcaaggactttggctaatgcctgtaaattttctccatccggctctgtaactcgtgtttcccactttgtaatagaaactcggcttacacttaacatctttgctagagcttcttgtgttaatgacaattgtaaacggcgttctttaattcttatgtgcattttatttctcatgtaatttatatttccttttttttaggtaaaaagtatttgcgtactctttgtctatttgttaattttaattacccaaacggataacttattaatttaagtgatatgcatataatataaattaattatattaattcgaatgacgatagttttagcattaataaaatgcttactattttagtcatgattaaatttaataaaatagaatattttacaaaacactaacggaattaccatcttttgttattttttcaattaaattatttttaatttaacgctttttggcatttagaaagaataaagagaaaaggagttcagcatatgaaatcattaattataaaatctcgacctcagatagtgataccagaattagctgtcaaaattggattgcatgaagctttagtattgcaacaattgcactattggataacagaaactaagtctggtattgaacatgatgggcgacgatggatttacaatacactatctaattggcaattacagtttccatacttatcagtatcaacgctcaaacgggcatttgctcagttacgtatttctgggttgattgaggtaaaacaactcaataaacatcttcatgatcgtacaaatttttatagtatcaattatcaacataagatcttgcaaatagaagaagatgaaaagagaagcttgactgaaggtaattatgccaataaaacaacaataaaaccgttcgatgagcccaaatcgaaacaatggacaggtgtaacaaatctatctcagagtagttcaaatagagcccttcttacagagagtacaacaaagataactacagagagtaacaataaaagatctcggtcagtttgctcgttttcaagtcctgaacgtccagaaatagaaattatccgttattttaacaaagtgactcactcccattaccgtgagtgtcagacgacgttaggatatatccgtgcaagattagctgatggttttcatttcgaagaattgatattaataatcgattatttaacagctaaatggctcaatgataataagatgcaggactatttaaggcctaaaacattatttcataaaaataattgtactgaatatcttgataaagcgaagaaatggcatttaaaagggaggccagcatatcgaaatgggcaatgtttaaaacccggggaaataccgattgaaattgattatgcagaaagagacagtacgtttaatttactatttagctcagcgtggaagcccaaaacagcacttcaaattctagctaaaaaaatggctttacagcgtggtttagggcatatgcatattcacaaggctaggtctgtttggaaagaaatttggtatcagtcggctcaattaattgctcgttcaacaattacagataagatcgcataaggtagtggtgatatgagagatatacaacaagtattagaacgatggggagcttgggcctcggatgtacaaagtggagtagattattctcatattgcagcaggttttaagggtgttttaccttatcaatcatcttcaaggataagttgttgtgatgatgatggtatgattattgacgctacaatagcgcgattacaacaattgagaagagaagaagaattgaatgcgcttattttacattatatatatcagtgctctaaaagaagcattgcaagacgttggaaggtgagtgaaagccgtgtacgtcagattatacagattgcagaaggttttgtagaaggtggtttggcgatgttagattcaggattagtcatggatcatgaagttgcttgtaataaaaaacaggttaaataaaaaagtattaacgcgctacgcaaattaactgttattctaataaaaataaagatatttttctgggttatatatattgtaaaaatataaccttaagtgattaaatataaaattttatataaattaatatttttattgctaaccttgttaagtaatgcttaattttaaattttctaatttttatgatataaacttatgcagtcatcttaaatgttagagttattatggtacctaaaagattaaaggctgcaagggcaagagttgcattaactcaagaagagttaggtattttagctgggattgatgaagaatcagctaaaattagagtgtgtcaatatgagtctggtacacaccgcccaaactttgaaactatttgccgattttccaaaatattaaaagttccagaaaattatttttatactttaaatgatgaattcgcggaagagttaataaatatttataataataaatataattgctcttaaatattatttagaaagattatacatgttttgttactttgttatataaagtaaagagattacatgaataacttaaacttattatgtgctatttaaaataggaggtaaaatattttataaatacactattgtttttaatataatactaaagtctaattatggttccttttaggttaagatatgcccgtaaaatggcaaaattaactcagacaagattaggtactctggccggaatggatgtagctagtgctcgttcaagaatttcgcaatacgagtctggactacataaaccaagtttcgaagttgtgtgtaaactagccaaaatacttaacttgcctgaatgttatttttataccgttaatgattgtttagcggaagatataatgaaattatatcgtgaaaaatataataagtaataagcttataattcatctttattatttatatttttatgtcttaatttacgaataatttgatttcctttttcatcaaagtaccgttcaggccatattgttgatggaggtatatcaagttctttagcaataatttgttctccttttggccatggacgggacaacgcgttagatagagtcgatgagcttaaacctgcagctctggaaacttctgctagtgttgtcccttttttctttaaagaagcaataatatcagccggatgccagtttttattaatcataagatatccatatagattggtttaaagtatattgatgaaagtaaaatgttaatatatcggttaacatttttcattttaaataattgttatatttttttaaatgaagtaattcctatttttaaatgtaaccggttagtatttccatttataaaatatattaaatatataaattaatatttttatttttacaattatcagcagggttatttatttaaaaataatctgacaaaaaagacttgctgtttatatgatgacgagttacacctttatatatattcatatttctacactaaagggtaaaatgtcatgataaaacagaacgatatgacaattcaggcgtataatatattagaaatgatatcccaatatacggggaataatataatagaaatcgttactaaaacacaactaagttatgaaagttgtgagtttttacttacacaattagaaatggcgggttttattttaaagcatggcgagttttataaaagaacaactaagagggttaattaattattgcataacatcaaaaaaagattgatggtaatttttccgacataaaagataaggtatatgtgatgagatagtgaagagaatagttacatctgctagatgaaatggtagtggatttttttatagtgaaaatattactgttgctgaggtttacgaagatagggttaagattgaaaaaatgcctaatagatagttatataaaataaataggccaatttcccctctactttttatattaatgaaagttaaaggctagggactaatagtttctggcttttttattatttagataaaggatattgatgcaattatacaataatgatgcattagctatattaaaaacattacctgacaattatattgatttaatcgccacggatccaccgtatttcagagtgaaatcgtgtgcatgggataaccagtgggataatgttgaggcatatctgtcttggtttgatgaggtactagttgaattctggcgagtattaaaacccaatggtagtttatatttattctgtggttctaaattggcatcagatactgaactgcttgttcgcgggcgatttaatgtattaagccatattatttgggctaaaccatctgggccatggcgacgacaaaataaagaaagcctgcgcacctttttcccttcaacagagcggatactctttgctgaacattatcaaaagccaatcaccgctaaaggttctgaattttctttaaaatgccaggagttaaagcaaaacgtatttaagcccctgattgattattttagaaatgctcgtttagcactacaggtgagttctaaggagataaatcaagcaacagataagcaaatgttcagtcattggttcagcaatagtcagtggcaattacctagcgaggaagactacaaaaagttacaaacactgtttacacacattgctgataaacaagaaaagttatcgtcgttatcccgccagtttaccgagttagagcgagaacaattcaccttacaaaaagattatcaagaattaataaaagaatatggtttattaagacgaccattctttgtaactgcagatgtgccttacactgatgtgtgggcttatccacctgttcagtattatcccggtaaacacctttgtgagaaaccatcggccatgatggaacacattattcgctcaagtagtcgcgaaggggatttggttgctgatttctttatgggatcaggagcaacactgaaagcagcactaaaacttaatcgaaaggttttaggtgtggagcttgagaaagagcgttttgaacaaacagagcaagaaataaaagcgctaacttgtaagtaattcttacaggttcagttatctggaatcctcgggtggttttgttgtgaaattatttaataataaaattatttactatgaggttttgacaatagagatcatttattactctttattattatagtttttctatatttttttaataatgaggaaaaaaagcactgtatgtaaaaacagttgtttagattgtgatatcatctagttaatttacttaattacattgaattatgtttaattatatataaaattttccttatgtttatataagggaaagcatatggccacttttaaattttataatattcagcttctgcctgtggatagaaaaaaagactcagaagtaggcgtgtctggatattgcaaactttttgaatctgttgagaagcaacttgaaacgttaagagaggaaaaggaaaaattaagttccgtttctgccaagcttattggtgatatgtatttctcagcgttttcgtcatcaatatactcttatcctttggaaaatggtgagcaatacttaatccatgggtattttcttaaattcgatgatgttaacacattagttgatacagaaagtgggaagattagttatacatcatctggaaataatagtagtcgtaggtttcagtttgagtttgttttcgatcctgctttacatatccttgctattcaggataccaaaggattaccaactagaaatgctttaataaaagcattaaaggaagtattaggagcccatgccaacaatctttttccatatcatagtttagaaatcatagagttaacctctgcagaatcgatacaagattttttcttagcacctaaaaagggatataagacttataaaggggaggtaacgttttctaattcagatgagtttgattttgattcagaagatgaattaagagagttagcaggagaacttgaattagaactgaaaactaacgaggtacataaatgggaaacaagttaccgaagctttaaagatcatttgatgaatgacttaccaaaaaatgcaaaagctcaattaatcttagctgcaaaatttggtaatgctgaagttagctataaagatgaaaataatgagttacaaagatataaaatggaagattatcccgttaaggagaaatacaatgagactaatagaacgcaaggaataaagaatagaaccttaggtataaagaatttgattgttttagcaaatagaagagctaaaaaagcattaaaagctattagcattaatagaaacctttttaaaaaagacaaataaaataggaagaaaacatgaataggcctatgaaaaatatgatttatctaagagttagatctatcccaatcgtaggttctatttttcgtattgcaaatgcgtatgcttttaagggggagcctcaatgcaataaaataatagctccatggaaatattggtgggctaggatttttaaaaaatttcttatagttctcatattcacgacgattatgttttttcttgaaaactctttagcaagtgaatccccatggaaccctgctgatactgtattaagtatatttccgagtattttagggtttgggattggagtttatgcgctaatgtttattatgcctagtgactttatgcattatcttaaaaggcgttatgagtcaggtaaaagcgaaataagccatcggattatcccagtagatatgggatatcctttatctatttttatagtcgttttgtgtgtggcttcgatttgtaaattgtttaatcaaaatgggattacctactttgccagtttgttatcgctgttttatgggttaagtatgtccatagaattaatgtcttttttgtttaactcatcggttagaattcaagctataagaagtatggggaagaatgacaaacaataactgatatgggggtggcttagtccagtctatataataattattgctgtaaattaaagaccacttcggtggtttttatgtcaacttatatcaggactagtcaccaaattgacttaaaacttagtaatcaacctaacgtattatctccacatctaataaataatacgcaaataacatatcaatcactcacttatccaactgtgtgcctgtattcctttaactaaactcggacactccgtagggggggtatatgcgcatggacaaattaaccaatgctacctacggaacagctggcttaactgccttttttgttagtttagaaaaacgttgtcagattgcactctcacatcatcggtactaatcatgaaatataggaaactctatgccgtcattgtgatggtaggcattattgtgggtggctattgggtgattaacaggcaagctaacaggattaattcactgatagataccaacaaaaaactgatagtggctcttgaagaacagaagtctattaatactgattatcaagcacgcataatgcggttaaaccaactggatattcaatatacgcaggagctagcgaatgctaagaatgaaattagtcgcttgcgtgatattagtgagcgtaatcttgaacgggtgtatatcaaagccgagtgcccaaaaagcaaaaccactccctccaccagcttggcttctgcaaccaccgccagacctactgacaccgctatccgaaattattggttacttagagagcgaattgcagagtcagagcagatgattaaagggttacaagattacatcaggcaggagtgtgtaggtgattagcgttttttatatctataaccctttaatatctatattaaatatattacataagagagtagatatcgaaagtataagtggactcaacaaattctgatttcacggttattgagaggctgtttttattgtattttaacgggaatttatctaagccctctaaaaggcatgtataataagcaatatcatcagaatttctttgcaagaatttcacgttactaacgggcggttttttatgcattttcctttgttgaataatgtgaataaaatggcttgtttgactggataaattacgagttaagtcagaaataatgttattttgaaccgccggtatggttagatctttcggataatgatgtttaaattcaatagtagcaatcaaactagattcatctttattcaacgaataaagagataagtccactgcaccattcctactttttggatgttctgtcattgctaagtaatcagagttctcattgataacaatggtaatttcatccctaatttgattctcatgttttcgattatagaaatataaattaagttcgtgtaatttttgcttaactcgcgggtcttttattgcgttaattaaagttaaagtcacaggatctatatgaaatgttttcattagtaaatgatattttttttggattgtatgtaaatcttatcatgataattaatatatagagaaatcatgactaaaaacttagtttggatagcaatcaagtgagtttattatttcttatgaaaatagttacatgaaatatcatatctgaaggagttatgcgaaataaaactaagaaaaataattggttacttagagctgaatcaaagtaaatgattaaaggaaaaatagtttgtgagtttgaaaggaaaacaatttttttatgattatataaaatattacatgagtaaaatttcatgatctagatcgataatatatcctaatatagctgtatttcatatgctaagatacatgtaaatgaataattcatgtttacttggtgtagtgtatatggcaaataacccacttgctgaagtccagcgtgaatcagcaggagcaagtactttcggaaagtataattttcaatttcattgggcattatgtgagattattgaaaagcacaaaaaaaatcaggaatatgctttattaattgaatatcaggaagatgttgtaattgctaatagtttagatccaaacaatgcacagtttgaattttatcaagtaaagaatcagatagctaagtatacatcagcatctcttacaaaaagggataaaggtaaaaataataagcttaaaaactctgtgcttggaaagctacttagttcttgtgttaatacttcatatgaaaatagggttgttaagattgggctagtttcatcaagtggatttagcctaaatattgataaagatcttaaactagatgtaatcaagataggtgatttagcaaaagatgatttagctagttttttactccgtatttaaggtagcaaatttaaactgatctaatgatagataagcattgtttaacagcctatacaatgctaaaagtcagaacctgacaataaaatatatcttattaactaataaaataagtagtattttaaatattgatgctacgccacatgggttggatagaagccgctgacttaatcattaaaggtatggaaggcgcaatcgaagcgaagaccgttacttatgatttcgaacgtctaatgaaaggcgctaaactgctgaaatgtagcgagttcggtgacgcgattatcaaacatatgtaattgttgatttgataaatagttaacgggagcttattagttctcgttttttattatcaatattgaaacggttatcaaaaagttatcaaaacgagttatcaaaaccacctgaaatttgagcaattaaatcacgatttttatctaatttttggcgttcaagttgttacctgattactcagcgtctaattttgctttccagctataaagtaatttatcggtgatccctaaaaaacctgccgcttttggagcgctataaccttgttcgctgactaatgcgaccgcttcttgcttaaatccagtagtataaacactgtttgttcgttttttcatttaacacttcaatagttagattatattccattattaaagagccctgtttgattaaagtagatcaaataacccctaaatttaattacttataataaataaatattttttatttcttaattaaaatttttgttttaaataggctgcttattctaatttcaatagtctattgatgaatggtttaatttatttttctatctttatttttaattatcttaaaataatgaaatagctgatgtaatcatatttaaaagtgatattattattttataatcatttatatatgtttacattgtttttattttaatgctggagatacacgtgaataaaagagtgctttcgacaaaatatcgaaattcgatgtgtccatcaatgataaaaaaaatagggggatacggtttatcgttattcttgataccaataatattctttcattccgctaatgcgttagagttatccgttcctattggctcaacaggttatttaggggaggtcactccgccagttggttcaacaacgaaaaattatgggatggtaagttcagtgcttcaggcgaatagatcttatataagttttcggtgggagcctagtcaatttgtgataagtgacctgcctttttaccccgaaatcggtcgagtgggtgtggctatctacaataaaagcaatcctaaaggggcctttattgttttagcacccagtggatatggtttgttgcgttataaacgggctaacgatacatatgagaatgcttcattttcatttagtcgttccaaaaccaccgctatgacaaatatgtataataattttccctctaattctgatgaattaagttggggtcttttgcccagacaaggcaatagtaattttttctcagcacgatacgtagatggtagtgataaagttcattcgttaacattaacaatatccagttattccgcgtatgccatcgggccattagaggccggtgaatatgccatgcgtgatgattcaaaattttatgccgtcattcgcactagttcaggttcttttgcaagatctaaaacattattaagttcaatggataatgtgaatattaaagcacttaaagcctgtgacgttatcccccaaacgtctaccaatattcagtttccgactcaaatcgcgaaaaattatgcaacacccactaaattagcagataatttagctagtatcagtgtcaattgtccttatgctaataaaaatatctatctcactctgagcccttttaataatttagtctcaggcagtgaaacagggatggagctatccaccagtagcactgaaaatatcaccacactgccttatgtggtggcttctttaaaatctgcacaatcaaatatttgtcaagccaatgcacaagatgccttgcgactcgtcggtagtaataaactagcacaacaaaatatgaagagttttacgcaaaatatactttttaacctttgtgctaatggcaatatcaaagccaataaatatgcaggggcaattaatgtagcaattttaattgaatagcggtattccggtattattgataactggcttgcgcactacatgctatgttaaagaggagttttgatgatttaggtaacataaagaaatcatttaaaaaatatttaacatccattaggtaggggagtgcaaactgtgcttgatagccatcagttaattgctggtggttttttattgaagaagattatgtcagataaacaagagataggtgagtttatctacaaagtcttttcagagctattttaatattaaatgtttttctccaactgatgatatagttactagttaatatactaggcttaataagctattaaaaataaagtccctatatttgtcaatattgttttaataaatttaatttaggttttattttaacttttggtgctattgttttgatttatatgtaggtcacactcattatcaactatattgcagatataaagatagccatgtatatggtgatattccaatatatacttcaggtgcgctatttgagggcgatgactatcttatcgatgtgaaaggtaaatacattagtctaagattacggattgattagatatgatgatccgtaaggctgttgctaaagaacctcataatttttaattaataaactcacttctgtgagcttattaattggctttttacaataatgaataacatagttatatagagaatggtatttataaacaaaaaataccctgtgatttttatactcacagggtgtttaaatgaagcaaaaataaaacttaattagatatcaacacgggggttgatagagattttaatataaccaattagttagaaagtctctaatagtaactactaagtattgcaatagattaaaccaatttgtccatagcattattaatgtgtattagttgcaatagatgccaaaggagaaatttaaaatagcttcgccaacaaaatctaacctattagtaatatcgacactatttgcagcaaggcgatcacgtgatgatttatcaacattttttgtactgattaactatacctagttggcgaaaagataaatagtacacattaatatacaaaatactgtaattatatacagtaaaagattgcatttcgaaaaaatttgtcttatcatctctaaatagtgggcaatttgttactaagcacactaaactttgttaaacctcactcatttagtgaggttttttgttatctgaaattagcgaataacaggcctaaaaacatgccctagttataagactaattaagttaaatggaaaaaaacttatcaataatataaggaaatatttatggaacactttactaaaaaatcgttatttacctgcgataaaactaatgaaaatctccctaataaaccgggtgtaataacacattgccaagagctagcgtctgacttagggttaagcgaagcttttgcgcaatacacaatatcttatacttcttgtgacagtgttcatggagaaattatccgtgaagatactggtgccgtttttattccgaaaagtcaggcgcctaaaaatggttggcctgtcattgtatggaatcatggtacggtagggatagcgccaacttgtgctccttcattaacacctaaaaatagtcgcgtatcgcaatatttaaatacttggctatcccttgggtttgcgattgttgcaccagattatccaggtttaggctcatcagggttgcatcattatatggatgaaagagcaacagcatggagcgctttggatagtgcaaaagctgtcttgaaaggtgggttttcgctaagtaatcgctttatctttatggggcaatctcaaggggctcatgctgcatttgcctctgtcggctatcagcctgaatatgcaccagaattaaatatcttaggtgcgatagtgacagggacgccttattttagtgataatctacttgaaaactttattagtgatggtgttcaagatgaaggtgatagaaagctaccttacgcgatgtacttatatctttctgctgctgataaaaatccaaacttaaaagtggaagattatttccaagaattagcaataccttatgttgaaaaagcgaaaacgctttgtatcagtccattaagtcaattagtaatggataataaattaaacgcatcaaatagcttaaaacctaagttttacgagctattagagcaagaagcgtcaagtttaaattatagaaaacttcttgttgataagcccgtatttatagggattggtttagaagatattcatgtgttaactcgttggcaacaagagtttgcaagagatgtattggaagcaggcacaaatgcatatgtatatgaatatccgaatattggtcatttagatgtatacaatgtctctttgcgaaattcagtgccttttgtatttgaactgatgaaaaatgagcatagcaaaatagactaaaaactattttataactgattaatttctatcttaatcttattcttatcatttgaatgtggaaagatgagtgatgtgagatgccagatcatgttttggttaaagaacatctggtatctctttttattttaattctttgatttaaggaaataaaaacttatttttattgataagtttttatgattttgtctataatcaatcttattgatagattttttattcaccaaaaataaagtttgctatctgagtttttctatggcttaatgaagtcactggtttggaagtacagacctatttatgttagtcagtttaaagttgttcccgtttagcgttatccttgataccacttcattgcgaattccttctaattaattcccataagtaaaaataccaaacaaaccatatatgccttatggcaaattaaataaattaaaggaaattctatgtctaattcaatgactggtacagtaaaatggttcgatgaaggtaaaggttttggttttattactccagcagatggcagcaaagatgtattcgtgcatttctctgcaatccaaagtgataacttcaaaacattagctgaaggccaacaagtttcatttaccatggaaaatggtatgaaaggccctgcagcaggcaacgtggtggctctctaaaggcgctattacaattcgcctctattttaaatgcccaagttgtcgcggttcacaatatagaacatcacaatttgatgttacagtgaacaatccacacggcgcaaaatgtatcttttgcaaaagtgtgatgacagctcaaataagttaagcattaaatagttgaatatacaaaacctcgcttcggcggggtttttttgctatctacaatcttatattgactaaagataaaaaatttatattttagggcttgaaaaatgcttgctcgttcatatttatatattgggccaatcagatatcgcccataattcaataaatactgaaggaggaattatatgcctaatattaaacctttttcattattcccaactttatctgacaatctactttcaaaccgttttgatcagatagatcgcctgtttagtcagttaacaggcagtaaaccaatttcatcaccgactcagacttataatctgaaacagattgatgataaccattatgaactaacagtgagtgtgcctggatatcaagaagatgacttatcggtttcattgaaaggaagtcgcttattgattgaagggaaaaaagaagaaaaattagaagaagacaatgataaatggatccaccgaggtatatctcaagggcagtttacattgcagtttgacctcggtaaaaatgtcaaaatagaaaaagccgatttatcaagtggacttctgaccattgctattgaatatgagttacctgaagaagaaaaacggcaaacaatagcgatagaaaataaagataaaagctaatttagtgagatagcttaaataagattaaggctgcacataatgtgtagccttaattttttgtaatagcctataaattataatatttgaataaagaagtgcaaaataaaccggatgcttaaagaagtgcaagcttacactagaaaaatggattgggtgtttatggctcgcaatagatacacttaatcgttggagtatatgtgttcataacaaacctctttaagagggagcactttatgtgaacgcataatgagatttaaccatgatagtttatacagtagtaaatgtttaaaagattaaatactgttgatacaagaaagtgtgtcaaaaaatgatatagatatttatactaaatatttaaaagataagttattagtaaataatataccagtttttatttattatctaatatagaaatgagttttctattattaaaataatgacttcagaataaagaaacgatatgatttattttatttaaataggaactgttatgaaaaagccactttctttatggataactcaatttttgattgtctgctgtattatactgatattatatttttttataaccaatgcatcactgttattaaatttgtatagttttgatatgcccgctgagataaaaatagaaatttatttatggagttttattcgtttgttagttttaattatacaaatatcagcgctttacttttccttcagatgcgataaaagggcgcgggtattgactatcttagcttggctaccaatcattatcgtcatgttatggagcaatttccatgaagggttaacttctttgaacgaaagtggtataagctatgataatgatgctcaaagatctggagggattataggtaaacttattctggctggattatccctttggttgacatctattatattattttcaaaaaaattaaagcgttattttctatttgagaaaagtgaatgatttttttgactacaaaaatggatggcttaataaccatccatttttattgcataaaatatcttggtataaataattattaactaaagtataaatacataattattagaaataatatctgtatactactccacttcttgtcgtgacaagatattaggtaaatttatttctatccaatccgcaagaagcgtgagtttctcacttatttgctcaccaagatctgtcaaagagtactctacatggggtggaacaacaggatatgacactcggttaataaaaccatcttgctccaatacttgtaacgattgagacagcattttctcacttactccgccaattttacgtcgtaaatcactaaaacgatgtgttccatctcgtagggctattaaaatgagtatgccccaacgacttgtaacatgtttgaggatctctctggatgggcactgtttagaaaataaatttccttcacgtaattgctgcgagagtgtggatattgtcattgtatacttacctttttgtatgtacttacttttagtaagtttaggtgctatgttatcaaaacacaagtgatacattaaggagttatcttatgattgcaattactggtgcaacaggcctattaggtcaacatgtgattgaaaaccttcttcaaaccgttcctgctaatcaaattgtggcatttgctcgtgatgtaaaaaaaggatcgtctttaagtcagaaaggcgttttagtacgtcaggcggattacaatgataaagcttcattaataacagctttacagggtgtcgataaattacttttaatttcctcaagtgaagttggcaaacgtaccattcaacatcgtaatgtcattgaggcagcaaaatcagcagatgtacaatttattgcttacactagcatattacatgctgatcgctctccattaagcttgcatgtggaacatgtagaaacagaaaaaatgctagctgattctgggatatcttacactttattacgaaatggctggtatacagaaaattatctggcaagtgtccctgcagcaattgagcatggcgtttttctgggggcggctggtgatggcaaaatagcttcagccactcgggccgattatgcattggctgctgctcgggtaattagtgaagaaggacatataggtaaagtgtatgagcttgcgggtgatgaagcttggacattagagcaattggctaaggaattgactaaacaaagcgggaagcaagtgatatataacaatttaagtcaggccgattttgtcgctgcgttaaaaacggcaggcttacccgataaattatcaaatatgctggctgattctgatatcggcgcatccaaaggtggattatttgatgatagtcataccctaagtaaattaattggccgacgtacaacaacacttgcggagagtatcaaagcaatattgtaaatcgatagctaatatctattctattttcagtttaattttttggcaccctaagagttgaaattttgggtttcacatgcagggtgcctttcataagcattattatttatgataggtgagcatcaattaataaaagattaattttagtcgtaaaatagtaggatagactgctacactaggtaacaaaaatgaatataactaaatgatattgaaaaatatttattcagcttaataggactttatatgaagctagtttcagcgatattattaactttattttttgtttcaggatgttcgacatcacagtctgatattgataaatatgagcaatcgagtaaagatgcgatgaagccagatccatattctgacagcgtaatcaatacgattagacagcaccagaagatcaccgtatgtaatagtaaaattggtgggtgctattgatttaatacggcacagcgttaaggttaaacaatatactttaggatattctgtgcaattaaagacacagatgcgttaccatcaataataatgtcagcactcagcttttctctttccgtcattgctgtatatgagggtcgtgagtagattaagtactcttctaaataatgaataatatcatttccacttttctctttataatcacgcaatattcttcttgctaatgcgatatctagtggtgtatcaataaaaaaagcatagtcgatcatctgttgtagcgctgggtgagatctggcaaaaggataatccaaaatgatatgagtatattgagactcttctatcgtctgattaacttgttcaacaaatggctttatatcccattcgctataattaccaccttgttctatccactcatcgagatcttcaggtgctgtagggcagtcgaaatcatcaaaatgaaggcatttgcttgatggaagcttttctcttatataatgagaaagtgctgttttgccgccacctgcaattgaggtgatagagataattataggtgattttatagaactcattgttagctcataatcaaaataaaattgcataggatattatatagactaatttatattaagtataatttatttatagtattctgaataagttcagtttttagaaaaacttaattaattatagtaagaggtaggaattaataaactatactatatattaatataactcaataagtaacatcgattttttgattataaaataagcggtattgtttgtaaaaatagttataataaccagagtgatcacttattctcactaagagcatgaacgtttacgtgttaacattatccaaggcaaacgtttagtttttatttttgagtgaaacatacatctttcgacttttttatttaattttctttctatttctgtgggttggttaataacatcgtttttggtactgccctgtgtttttaatagaaaaataacaataaaaaacaaagagataaagaataataatatatatcgcacttgatttctccggtttataaaaagcatggattgttgataattttatatacaaaattatcaacatgtatagtaataaataagaataattatatttttataaataatcttaaagttatcttaataactttttttgtatcacagtataatattaacaacggtgttattttaagtgtcgattaagcataccttcgaaaagggaattccatcgatattctatagtgttgattggtctagtgtaatttgcttttggcggggattttactaatatgagggcttaatatgcttttgattttttgtttgcgagtttttttatatctaatcaagcaaaaagaataattattcttgaataaagttaaataatatgtataaggcattatttttcttttattggtataataaattctgcagataaagcctgttttgctttgatgatatttttctcatctgaaagattaatgatttttttatccaataaattataattaggtaataaactttgtggcgtcatattgagaataaatgcaatagaaaacaaaagttctaccgtgatttttatgttaccattttctattcgagaataatgttgctggcttatccctaagcgatttcccatttctatgcctgttagtcttaactcttttcttctttgttttattttgtgtgcaatagtggagtttatcatgatcatctatttttataaggttataaagcattttttaaaagcaattaacttttagttaactgctattaaatgttatatatctgtattaatttagtactgctattaattctacagtcagaaatacaataactatcacttttagatcgatagcggtaaaatttaacataaatgcaaatttttagtatttataaccaaaattatcgattattcttatatattaatatcaatataaagtaattatcaaaatgtttttatcgatcgatttgtaatataatgatagcttttatctatcaaatgaatggttacgatcgtcaatatcaatcatttgattgttattatcatagcaacaataaagaagagaatatctaaaattattataattatttattatttttttgaatgataaataaatttaggtgtatgattttagtaagataatatggagctaaaaataagctgttttttagtttttttaagataaaacataggatgtcatcaatatgaatttttcttactgaaaaataataaattaatactaatttagtaagaaacggaagtaagccatataaataaattatttctatggtcgttgatattactaacaaagcaccaataaatatatttattggtgctttatacaaagttatttctacttaaccgtccaagcttctgagaagtcgtgctctgaaaataattcagctaagccactaatctgttttaaacgtagtacttcatcttgtgacatacctaattcatcaccaatcttttggtcattccaacctaatcttgataaatctctaactatatccgacattgctgccacttgatgttgccctctagcccgattatggcgaatagtcgctgccatttggtcagccatagtatgactttcaacatcaagtatagtaataggtaaatagccgttaattcgcttgtttaagctattttttttactcaataaataacgatggtaaccatcaacgacttgccattgtgatggtttatttttggattgttgaataggtaagacaacaacaggctgagtataaccgtcttttaccagagacgtttctagtaatctcttttctgtcggagacatgacattgggattatagtcattagcgataacttgttgttgctttatccaaagaacacagtcagtaggttcatttttaaatgggcttatttgatgaagcgatatttttattttattgagagcttcaattttttgttcatcatttagttttgctaggtactcttttaaaacagaaattatagtttcaatggtcatattcacaccttgctaaataagttgccagtcttttcgttttccttgtatccgtttgaaatatcgatcataacagtgtgatttagtaggactaaatgctaatgttctacaccaaaaatcgttacgcaagatggtcttacaaattcgtcgccaagaaggtatctgtttagtgctagtatcaccttcttgtgcatcaggtatgccatttgggtaatctcgttcggcataccagcgaagatagaccgctattttattacgataatgttctgctgttttctctggtaaactggctaataaaaagtgagcataagatttccacgtatgatgggaaggtttgctaatttgatgtcgcccatagaaacctgatttattacgaggattcgtatataacattccggcatcagctccactcactcgttcacaagcaagactccatgtttcaggctctagcacatgatataaccatagtcccttgcgttgctctggcccaaaaggttcacaaatacgcatttgacttaaactaacgcccgcttggtgcatcagatcataaatagggttatagggtaaattgaaacgcgctatataagtccagatatctttaacatgccaatcataaatagggtaggccatataataaaagccttctgctgatgccgttgtccaaggaatatcatcggcataacgtaactttcgattattactaatggcaataaatcggtttaaagattcatccgctcttatgcctagcaggataatcgaactgcgatgattacctgtgatccactggttaaatgcaggggtaaaatcttcaaaaagcatatttgggtgataaaaagggaaaaagtgagggtcagttatcgcatcttctggcggttgtcttacccattttttaccagactcccatgctgtccatgtaggttcatattgagaaatgccactttcagtggtgatagggagtgctatccagtaaaaccgttcaatacaatcttggtagatagatttcatttttataatatgatctatagtcgcagaatattgaacttcccaatcaagaaacatcacattaaattttctatgttgttttcgcgcttgtgcggcaacaagatgaaaaagcgcagtagaatctttccctcccgaaaaggagagagtgatttgttcaaaagtatcaaatatccactggactctctcttgagcagcttctaatacatttttccccagcgcaattttacgtttcaaagacataactatcaccaaaatagattagctaatgttagtattatcacttaatcatatttagatgataaaggtaagtattaattgttagtaattattaattttattttaatacagtagagtaactactctatttaattgtttttattaaactaactgattatggaaagatattactatattatttcaatatggcgttatgctgtatagatctgtgattatgcatttttggtggttttttatactaaatatcaattggttatgcagtaaaatgtataaaataatccagcgcaagggcgatttaatatcttttatttactaaaaataaaacagatgaataagtttgcttatcattaagctgagaaagaagatttcttaaccggtcaatcggcgcttttaatgtcaataacaccttacttaaccgttagagtttgatttgttttttatttaatttcaatattttatgttgtcttgtttagatgattacctgtttaactattcgttatttccagttattcgtggtttgtataaatcatagaataatcattttacgactaggattttgtatgacactagacactcacaatggagttaaagtatatacccccacagcattaaaactttatgactggtgggtattaaatatttctaaccgttatgcatggcgttgtgatacagataaatatttgctacctcattttaaaaataatcttggtgagaaccatatggatattggtgtaggaacaggattttacttaaaaagagctttagctaatataaataaaatagcattaacagatcttaatattaatagcttagattatgctaaaaaaaatattgttgatgataaattaacttattgcttacagcatgatatctatcataaatttcctaatgaattcaattcatcgtttgactctatttctttattttatctattacactgcttacctggcacaatggaaggtaaaaagaaagtgatagaaaatataagtaaaatattaacggaaaagggtgttttatatggtgctactatcttgggggctgatgttgaacacaatttttttggtaataaattgatgtctgtttataacaaaaaaggtatttttagtaactattctgactcggcagatgctttagaaaaagtattatcttgttttttttacgatgtatctattcatattcaaggagttgtcgcgttatttaccgcgagaaataaaaaattataaaaaaagtagtatagtttgaataaattgaaaatgtatcaagaaggcgttacacagttggagataaagttagcctcagagaattaatttatttgatagaatgacaactgtttgataaataacagtattgcttctagtgtgtatcgcttaaagtaaccgaaaaaagcttagttataaaatataactaagcaaaacggggataatcaaatcaaagtgtgtgtccatttaagatgatcaaaaatggataagcgttaaattatctaaccattgagaattaatcaactaaaatttaccaattaattgtaaattagatattaatacttagttatttttacttatttggagcgctaaaaatatgtacaatactaaaaatatttataaataatttatgtattgataataaaaataagtagcaataataataacaatatagtcgggttctctctacatttagcattgttaaataacaaatgtataataaattatttaacaggctgatgccttaatgttagagatcatgcgtttagtgaccaagttatacatcattttatgagatgaccggacaatgaatagaaaagagcttatcgagtatatacagaaaacatatgccgtaatccccgaatatttatggagtaagtaccctaattatgcggttttcagacatcataatcattctaaatggttcgccgtcatcatggatgtcgctgaaaacaagctatttgatacgggtaaaaataataaagtcgatgtgattaacttaaaagtaccggtgcctttagtgggggctctacgcttaaaaaaagcagtttatcccgcttatcatatgaacaaagagcattggatttctattcgcttagacacagattttgatgatgctgagctaaaatcattaatttctgaaagttacgaactgacgcagtgaaaggcttaatactaataatcaataacaaggtgaatataataaaaacttatagttataaatagaatatgtttagaaaaagcatctatttttgatgataatatgacttggaaaaagcaaaagtgcacccatgttaaaaataactttataacagttttgaatctgtgtttccttaaagtcattgatagcgtcaggtggagtaaagatgaacaaagtggtttataaagtgagtggactatggaacgaaacgtcctttgtaaatctatttattgcaacgaatgaaaaagaagtattatctgcaattatactatgggctcagtttagtggtgcaaaagtggatgatttatctattgagtattatagttccgtgcattaacacagtgttaacttattgattaataacttaattattactaaatatcaatcaatttaatcagatagctaatatttgctgtaagtatattagctatttgctattcatatctatcaatattgtgatatcagtggttaacggctatcctttcctttaataatattttacaaactaattaaatgataaacatagtaaaagtagcattatgttactaagataaattatgagcatagatttattaatctgattagtcaggttaggtgattgtttcatatgaggtcatagccatgcccaaaactcttatgagtcttaaacaaaatgattttacgcataaaaaaattatcgtaggtattagttcatgcttattaggggataaagtgaggtttgatggtgggcataaatgttgtcatcttgctgctgatgaattatctgagttctttgaatatcaatctacttgcccagaaatggctattggtttaccgacacccagaccagcattacgattagttcagtctaagacaggtgaagtcaggttaaaatttagtaatggaagtgaaggtgacttaacccaattgatgaatgattactctatcgaatatttgaggaggtttaatcaatttagcggttatatcgtgtgtgcgaaatcacccagttgtggattagaacgtgtccgggtttatgatccaataggcaacggcaataaaaaatcgggtacaggcatttttactgaaaatctgaagagaataatgccgtggttacctatagaagaagatgggcggttaaacgatccctatattagagaaaattttattacacgggtgtttgcgcttaatgagctaaatcaattgaaaataaataactttactcgccagacattaattgattttcatacaagatacaaactattgttattagctcattcacaaccgctttatcggcaactagggcgctttgttgctaacaataaagattgggattcattagagactttctttgttgaataccgtaatcgatttatggctctattacaacatcaagccacacgtcgtaatcacactaatgttcttatgcatgtgcaaggatattttaagcaagatttaacttctaagcagcgacaagcattaagccaattgatcttagagtatcgtcaaggaatacaacctttattggcaccattaacattaattaatcattacttatcagaatacccagataattatctgagtaaacaaaaatacttttatccttatcctcaatctttaagattacgttatggtttgtaatatattaattccactactgtatctatttttatagaaagaaaataactatttttaataagtgaattttatatttaaaacaagggaaataggactgctttttgtatttaatgctttgttaatgtaagttaaattataatattttgtaaaaggatgtaagtcagaccgttctgtttatattttatgtcagtattcttttttttataaaaagaggctgatatgtctacaatgaaaactgaagtcgttgttattcgtttaaccaaacaagagcgagctgcattagattcaataaaaacgatgccattacttgcagattggctaaaggagctagccctttccaaatggaaggagcaggcattacaattagaacaatctaaaaatggtcatagtaattaatgaaatacgagggtaacaatcaacaatcttaactaaaaccctcgataaaaaattattgaatagattgttagctattctatttcaatcagttaagttattagtgttatcaagttactgattgcaaaaagaaaagcccaatgtggcggcattgggcttagtgtctcaaatagatgggtatataaaaactattagagaactcttttactttaattcaaatttatttatagaattaacaataagtgctttttgatagaagaatagtgatgttcgtataaaatatgagcatttttatcttatcctgttttatagtcttaagttagaccaatttcatgcaatagtgtgtcgatatcctactttgttgtagttttatgttaatttttacttgatatcgctcttgtttttcacataaagagtatgacagtgacagcaatttaagggagacttaaaagtagtatgacactcatcactcattgataatggaaggtaggtaatatgtttccagaatatcgtgatttaattgctaagcttcgtcaaactgatccccatttccgagccctgtttgaacaacataatgaacttgaccataaaattgtacgcttagaacaccgagataggcgaggatatggagaagaagttgttgaattaaaaaaacaaaaattacgtctaaaagaagaaatacatcagatcttaaaaaatcccccagaagatgagtagcacaaataagtactgtatgtaattaataaaattaaatagaaataataaaagaaggccatatagctaatggccttcttttattatggtttaaagataatatttctcatgatatttatatcttttgattgtttgtgaataagaactaaaagttttaatactgtttatatgtttttattttatactgcataaaaatatttaatttagttaagttgtatagttaaattttatttaggtttttataaagagatgtttttttataaacataccagttttagttgttaattattattcttttatctgatattcatagagaaatataatggcaattaagattatccttatcctaattttaattttctttgcgataataaaaattcaagacgcaggtatcattttttttattaattacaaaatataggatatttatgaaaaatattattttagcactaggtttattatcattatcttctgttgctgtttcggctgaattaacaaaatcttgcgaagattattttaaagaaactgatgcctatgtcgcattaatggaacaaaatgatgcaactaaagcacaagcagaaacaatgaaagcacaatatgctcaatcaaaagaacaatttgctgcattacctaaagatgttcaagaaagcacctgtaaacaagctttagattctttagagcaaatgaaaaaaatgtctgctggtcaataaaaaatagatttaattaaagtcttatgtttagagaataataaggctttatttttatttcaaatttaaaattttccaatgtaacaatgaccatataataaccagtgttattatatggtcatcttaatattattttaatataaactatttctttcttgtttttttgtggaaatatttcttttttacttaatattacaatctctaatcaagataattatcccgccataacccatctatttatattattattttatatattcttgttacttgaataaagaatgctttttatatgaaataattgtaattcattttgtcgtctataaattttatggaataattatttacatctatttattgctcctatttaagatatgaattggtcttttattctaattttagctctatttgtagttgttggttgtgttgataaagagaggaatacatctggctctatagaaaaggtggcaacagagatagcgactcctactgttcaatatcaccacgatgaaagtcgttatcccacatttatgttatcaaaacaatctcgttttgaaatgcaagccaaggaggaaaaacagaaattcaatcaattatttaaatttggatttgaagagccaaccacatctactaatagcgaatattcctataaaaaggaacaacgtataagaaagaatgaccagtcaatgattattctgccagaagcgatacctgtatggaataaagataaacaagaagttgaagttaagtggagctacagaccaaaatatgtttttgatgcatattaaatttaacctttatgttttaggaagactatgcgcccaatttttttgttaataccatttatgtttttaattggctgtaccgagcaaatgagtgtcggaattggcacttctagaacgcataatataggatatccggtttgttcaacattagtttgtggaaagaatacgcgaacagttgaagaacaaaaggcaattaatgaagcggtgcatgaacagcaaagagctattatgcgaggagaaaaaccagatttaaaaattattgcctcatattaaataataccatcaaggagagtctattttttgtccttgatggtatagtcaatataagcgctaagctaagatagcgatgttatgttgtttataataaattttactctttggttaacatcggctttgggtaattcaattaaggtataattatactgtctatatatcgccagcatcgcttgataagttgctacggcttcatcaaatgtctgttgacgctctttatcttgtaagtaaatttctttccatggtggagcaataaacacggttgtagaatatctatatagccttattgcgttttcaagatgttggggaatagggcgctcacaaaagtgtaaataacctgctatatccggtatgcctcggtcataaaaataaggtttgctgttatcatctatattggatgcatcatgccatgatcgtagctcccagcttaacattaactcagcaaaagcgatcggatcaatccaaggaagggctgaaccaccaatatgactttgatcttgaataatggctctacctgcttctattgagcaagagtagccatttcttcttaacttattgataatagtgcttttaccagagccgggacctccggttaaaataatacggcaaggtttttgggacatagtaattccttaaataatatattttgactttaaatgattgagggctgaatgcagaaatttttagagggagaaaggcgaaaaataagcagtgctagcaaagaaagagaacaagtaaaggaggacaagatattacaattataatcgaaaagagaaaatatcaaaataaatccgcatcaaagatcaatcaatatctatcgacctcttttataacttatcaggttactttgtattgctattttaataactgatacgcatttatgcagatttaagcacataaatccaaatagaagcactatctggtcattgcaagctaaatagattacttttattatataatatatatgttttattataattcgtatataagggttaagtgtgggtattgtaaaaatttctgatgagctacatgagtatcttcgtaaagcaagtaatgtgatgtctcgatcagttaatgcacaagcagagttttggataaaaattggtattcaagcagaattaaatccagaaaaaacgtttccaatgattattaatgaaatgttagaaaaagaagcaataaaacaagagcataagtaaatataaaggagattaatatggataaaattacgattaaaacccctgaggaaattgaattaatgcgtgaatcaggtcgtttattagcccaagtttttacaatgcttgatgattttattgtgccaggtgtttctacattagaaattaacgataaagtagacgattttattactcatgatctgcaatcgagacctgcaagcaaaggacaatatggttatgagtatgtacttaatacttcaattaatgaggtagtatgccatggtgttcctaaagcagatgagctattaaaaagtaaagatattattaatgtcgatattacactagaaaaaaatggttttattgctgattctagcaagatgtatgtcatgccagatgcctcacctatagcaagaagattagtcaaaacaacttaccaagcgatgtgggaaggtatcaaagaagttaaaccaggtgcaacactcggtgatatcggtcatgcaatccaaagctttgcacaaagtcatgggtatagtgttgtaagagagtattgtggacacgggattggtcgagaaatgcacgaagcccctcaagtattacattatggcattcgaggacaaggtgttgtactaaaagaagggatgacctttaccattgagccgatgattaaccaaggtggacacaaaataaaaaccaaaaaagatggttggactgtagtcacccgtgataaaaaattatcggcacaatcagaacatactattttagttactgctgatgggtatgaagtactcactttgcgtccagaagaaacacttccataataaattaatttatatctatctaatttttgatgcaaaaattatgatataaatttatattattttaatagctagaaatattatttttagctatttttctatttatatattgatatttaattttattatttctattgtattttttagataaataactatatttatatactacaaggactgtataaaaaaacagtgtgatcatatagtgtattttagaaagataaacaggatgtttatatgcaaaaaatatcaaaactgatggaagcctggggctcatgggttgtaaataataatttatatatcaatacattaacaataaataaacgtgaaaatgtgccaatacgtgttaaattaagaaaagcctgtactgatcgccaaggcatcatagtctcggtatgtatgagtaaactactaaaaaatcataaaaaagattatgaattactagtcgattactatgtatttggacaaacatttattcaattagcacaagcgcatcgatgctctgatacttatatcggaaaaaaactcaaaaaagcagaaggcattgtggaagggatgttaattatggccgaattaatatttattattgagaaaaatgaaaatagtactttacgatcgtaatttaaggcttattctaaacaaactgatagcaaataaagaattgcaataatattgtttattgcaatttatctaatgagttcaacatttgctaataggatgttagcaatttaattaagtgtttttaaccccaaggagtggatgtatgtcaacgaaatatcctatcgttttagttcatggtttagctggttttaatgaaattgttggttttccctacttttatggtattgcagatgccttaaggcaagatgggcatcaagtttttaccgcttctctttctgcctttaattcaaatgaagtgcgtggcaagcagttgtggcaatttgtccagactctcttacaagagacacaagcgaaaaaagtgaattttataggtcatagccaagggccattagcttgtcgttacgttgcggctaattatcctgatagtgttgcttcggtaacttcaattaatggtgtaaatcatggttcagaaatagccgacttatatcgacgcattatgcgtaaagacagtatcccagaatatattgtcgaaaaagtattaaatgcatttggtactattatctcaacattttctggtcatagaggcgatcctcaagatgctattgccgcattagagtctttaacaacagagcaagtcacagaatttaataacaaatacccacaggcattacctaaaacccctggtggtgaaggtgatgaaatcgtcaatggggttcattactactgttttggtagctatattcagggattaattgctggggaaaaggggaatctactggatcctactcatgcggcaatgcgtgtgttaaatacattctttactgaaaaacaaaatgacggcttagttggtcgctcgagtatgcgattaggcaaattgataaaagatgattatgcgcaagatcatattgatatggttaaccaagttgcagggttagtgggttataatgaagatatcgttgctatttatactcagcacgctaaatacttagcgagtaagcaactttaatcatgataagtagtcatactttgtatactctatagttatatgatagatagttatatgatagcaaggtggcgtaaattattatggccaccttttttattagatgaaaatatcgaactagcgctgtttatgcacagatatagcaatgtggtaacccaataggtaaagcgcttgctctaggctatcgatttttgaagtttgattgatatcgagtaaacgctcaatttgggcgctatttagattcatttttcttgccagatctgcctttttagtttttgttgttaacatggcattatgtaatgcgatttttaagcaactaatagggggaagataaacaataaaatcccctgattgaggctcagaaggcatagggatcggcattttactcgaaataaactcttcaagtcctacatgtaaaatatctgaggcttctagttcaatatcatcttctgtatatgccactgcatgtatattgtcaaaatcacgataagtaatctcgtaagtttcactttcttcgtcaaaatgggatgttgctggataattgaacataaattgcctaattaattttaagatttatgctcatgattaaagcatatttagcagtttttatccaaagcaccgtaaaatcccgtccttcaggtcgaggatataaggcgcggttttttaactaactaggtgtttcctgttgctcaatgtactggcggataatggatattggtgcgccaccacaactccccgcgaaataactcggcgaccaaagaacccccttgtagtaataatgttgggcaatatcaggacgatcacgtcgaagtaatcgactcgatacccctttaaggctgttaaccagattagatatcgccagttttggcgggtaattaatcagtaaatgaacgtgatcccgttccccatccatttcaaccagttcaacatcaaaatcagcacaaacactggcaaagtagcctcgcaatttttcaattgcatcctgatcaaatatttttcgccgatattttgtgacaaagaccaaatggacgtgcatcaggaatacacaatgtctgccacggcgaatattagtttcatttttcatacaccaaagtataataggcaatatgaaacgtctacaagcctttaaattccagttaagacccaatggtcagcaagagcgtgagatgagacgctttgcaggggcttgtcgttttgttttcaatcgggcattagcacgtcagaatgagaattacgaagcagggaataaatacattccctatacaaaaatggcttcatggctcattgagtggaaatctgacacagagacacaatggttgaaggaagccccatcacaaccgttacaacagtcacttaaagatttggaacgggcttacaagaattttttccagaagcgtaccgcgtttcctcgattcaagaaacgcggtaaaaatgaggcttttcgctacccgcagggcgtgaagctcgatcaatccaatagtcgtatatcattgccaaagttgggatggatgcgctaccgcaacagtcgtgaagtcgtcggagaagtaagaaacgtcacggtcagtcagtcatgcggtaaatggtacgtcagcattcagactgagtatgaagcgacagaaccacaacatgaatcaacctcaatagtcgggcttgatgcaggcgttacaaaactggccacgctttcagacggtacggtatacccgcccgtcagcagttttaaagtaaaccagcgaaagctggcaaggcttcaacggaaattaagccgtaaaatccaattcagtgccaactggcaaaaacaaaagcgcaaaattcaacgtctgcattctcatattgccaatatcaggaaagactaccttcacaaagtcaccaacgaaatcagcaaaaaccacgcaatgattgtcattgaggacttaaaggtcagtaacatgtctaaatcggcaaaaggtacgacagaacggcatggacggaacgtaaaagctaaatctggtttaaaccgctcaatactggagcagggctggtatgaaatgcgccgtcagcttgagtacaagcagctctggcgaggaggtcaggtagtggcaataccacccgcctacaccagtcagaagtgcgcttgctgtggtcatacagcaaaggaaaaccggcagtcacaaagtcaattcgagtgccttgaatgtggatatacagcgaatgctgatatcaacggggcacgtaacattttagcggcaggacatgccgtgcttgcctgtggagggagggtgcagtcagaccgcccgtcgaagcaggaactcgccgaggtgattcagacatcagtctgaacgcagtagggatccacgtcctttagggcgtggaggatgtcaactttagaaaaaaaaggctattgtgtcagttgttatagtatgccagaaaaaggggagctttatgtatccagttgatttacatgcacataccattgcgagtacacatgcttatagtacggttagcgaatattttcaacaagctaaaaagaaagggattaagctatttgcgattacagatcatggtcccgatatggatgacgctcctcatgaatggcatttttcaaatttgccggtgatccccagaatggtcgatggtgttggtattctttatggcatcgaagcaaatatcaaaaatataaaaggtgaaatcgactgtactgagaagatgagtaaaaaattagatattgtactcgctggttttcatgatcctgttatgggatcactaggtatggttgataatactaaagcgcttattgcaacaataagtagtggtttagtacaggtgatcacccatccgggaaaccctaaatatcctatagatattaaggaagtcgcaaaggttgctgctgagttcaatgttgcattagaaatgaataattcttcttttatacattctcgagtaggaagtgagaaaaactgcattgaaatagcgaaagcggtgcttgatgccggaggtttaattgcgctaggctccgattcacatattgcatcatctttggggaattttgagcgagtattagaagtattggcggagatccaatttccacaacagaagatattgaatacatcaccaagaaaggtgcttgattttttacaagctcatggcaaaaaagagatcacagcgtttcaacatctttgagatagtgaaaaagcttaaaagctagcattattaaatgttagcttttttcaagtatcttatttgctcgagattgtgcatcgtgttagttaagctaacttgcttaaaagcattgttttatagttatgatgctcttgctcactatcattaaagccaaattgatatgctaagttatgtaactgtaatttatagtcagcaagtttactctcatcatcagtcataatagcaaattcagcaaagtaaccaagattgtctaatttatcgatagtgatatgaaattgctctagaaagtagatttgacgggattttgtatagtttaaaatacagtgataacctaatgttttaaacatcgaaaccgttttttctgcatcttctatttttactgcttcacattgggcttgttctgggccttttacaattaataaattgataccagaggggatcatttttcttacgcataaacttatagagggagcagggaaaggcgtattgggatgttctaaataccaatctgtttcatcatttttcgatataaataaagttgctccagcgagttgtaatgcatcaataaaatcttgaggtcgttttaagtggtatttcaattctgcttcaaatttaccttgaaagtgttcagacatctcttttccttatcaattgattattcaatatagcattatttattgtttgttgttcatattaaagaataaccctaagatttaactgggttataaatattgttattaaatttaaaatatagcaaatgataaattgaatattgtataaatagtgataagtgttttttatgtgttattttttagtgaaattatttattttataaaaataatttatgtttttgatttagggccaaatcttgtattttatttaatattaaagtgaaattcttaactaattaaatgatcacaaatcgctgggtaaatttttcatatgtgagaagggcgagggaaaaggtgaaaaatgaggattaagccataaaaaaagggctactgatgagcccttttaggtagcaaaaaacactgattttctgctaatttgattaatgttaatttaacttaacttattgatctattttcagaatacaccggtgaacgggttccaaccttgatcatttttcttttcttttaagtagtaagcataattagctgtcgccgcccataagaagttgagcacaatactgactacattgagaattgaagggcttagggaaagtccttccacgataaaacttaccacaatgataatagcaacattaatcccgaataaagttaatgctttacgccataaaccaaggataagaaaataaataaagccaaagaagaaagcccagatattcatcccaattagaatacgcttaccgaaagtcagtgctttatatgcagccttgtattctggagatttaggagaaccatatttttcgaagaaatcaaaacgctcttcccatttggcagaatattctttattcatcataattcctgttagagggtcatttaattgtagtcataaaaaaacgcatttttacataaagtaactttgcaaacaatataaatttattaacattttattaatatattgttttgtataataaatattatcttacacgcgatattagtttattttcataaaattcttattgttaaaatgtttatttcttttttataggaagaataagattttgagacaataaaattttattctaaagcgattatttagataaaaaataagaaatcaggttattggcgtaacctgacttctgataggaaaaatcttggcgttgagttatcgaacaactaaaacagaagattctgcatagctaacaacagaagaagctgtcgagcctagtaagtaggttttcattccagggttgcgtgagcctatcacaatcagatcagcttggattttttttgcggtctctaaaatacggtcgcgtgggttacctacggaaatataagattgggatgtgctattgggaatttcaatatgagataaactatcatttaacgtagataatgcaatttcaatacgttgcttatcattggcaagacggtcttggctgccaaaagcaaatccgacaaaggactcatagctaggaataacagataaaaagtggatatttagtttatcggccatcgctaatgctttgagatgagtgacaactttatccaataaaccaagctcagtaaaatcgatgggaactaatacagtttttgtcatagtggctcctcattaaccttttatatgttgggggctttagtgggttgttattatatacaccaaaaatcagtcacctcttaatattatcagtgcaaataaaaaacggtataaaaaaatagaaatattttcattttttgagatattcatatttattttatgtaaaaaggttgatctatcataagattgctattgatagtagaaaacgtaataaaaaagataataaataaaggaaaatatcttgatgtttttagtaaatatcgatattccatatgataaattatatttaatatgaattagagtgtgcagttttagagcgttactaaatttaatagaagattataaaaaatgaatttatttagttttaataaaatttatttttgaagaaatgagtataactgaaaatatcctttatatacaacatgttgtgtgtaattaatatttattttggccataatggttaatgataatcaattccattaattattatttgtttttaagtcaccataaatgagattggtttttatttttattctctctaaaagtataaaatatataaaaagtatatttaaatttactatatttttatttttagctgtgcataatatccataatgttaattttcatggttaggaagtaaaatatgttacatcaagatatgatcaataaactcaatgaacagctgaatcttgagttttattcagctaacctttacctgcagatgagcgcttggtgcgatgataaaggatttgatggcgctgccaaatttttaaaagcacattcccgtgaagaaatggagcatatgcaacgcttatttgattatttaagtgatacaggtgctatgcctttgttagggactattgaagcaccacctgctgaatttttatctttatctgatttatttactaaaacttatgagcacgagaagtttattacagctgaaattaataaactagctcacttagcaatgacaacacaagattactcaacatttaacttcttacaatggtatgttgctgaacaacatgaagaagagaagttatttaaatctattctggataaacttgctatggtcggtgatggtggtaaggcattgttcttgttagataaagacttaagtgctctttctacatccgcgcatatttaaataataagaataactatactgctgttttaacctggttggctaagtgcatataagcattgctcagattaacataataagctctactgtaatcgcacagtagagctttttttatcgacccagttagtgcaatattgcatatccatataactattttatatagacgtaatcgattttttatttttctactcctttaatttaatcatttcttaagctttgctgattattattttgtctattttctgttctttctattctctagtttgagtcgtcgatttatagcctattttagtttggcttttagattatttggttatgtattgaactgtgtagtgtgtcaattaaagtattatatttttgttaagtgtaaaaagggtgatatttgaaacaaaaatggcgctaaataagttatattttgagtgctagttcacaaccttttatttcaacgataaagaagcgcagatattaaagtcaatttgctataaaatcttctttatcataaatagaaaaatcacctgtaatttaagaggttattatgtcattaaacacacttaagacatcatggggcaaattatccgccatcgctgttttatttttaggcatgtcatgccaacaagccttagcacacgcacatctaaaatcacaattacctgcagagggtgcggctattgaacaagcgcaagcaccaaaagtgattacactcgatttctctgaagggattgagttggcctttagtaaagtaaaagtcactgataaagagggtaaagaaattactgtcggtaaattaagtcttgatcccgttaacaatacaaaattgttattgccattagaaggtgaattagcagaagggaactactctgtagattggagtgttgtttctgtcgatgggcacaaaacaaaaggttcttatcaatttagtgtaaaataatgactcctgaagacgtttatattttatgccgaatttttcattttgtggcagtcatgttcatgttcggactgagctgttcggctgccattctcgctaaagaaaagtttgttcctcttattcaagtacgcttacgcccagcattggcgattagcactatcactgtatttgtttccacttatttatggatgatagtgcaatcaggcattatgggagatggctggcaagatgcttggtcgctaacgatatggcaagctgtattgggaacctcttttggccaaatttggcaatggcaattagttttatcctctctcgcattaatcgctctctttattcatcaacgtagcattagaaatattagtctgttacttatctcaacattgatgcttgtgctgcatgcttttattggccatagtgccatgtttacaggtagtgaagccgtaatttataaactaaatcagagtatccatcttattagtggagcgtattggtttggtggtttatggccttttgttgtgtgcttacagtttttgcgtaataaagatgaattagctgatggcatgatcaagcctattattgccaccatgaaacgcttttcattattcggtcacttcgctgttttattggttatagctagtgggattgtgagtgccattatgttactccccggttggcctgcaacgacacaactttcctcagagtaccaaagtatgttatggctaaaaatagcctttgttgccttgatgttaggattggcattagtgaataggtatgtattagtgcctcatatccgtaagaagaataactttcaatggttgcttattaatagttggtttgagttattacttggtactatggttattttgacagtggccatttttgcgattaactcacctgtatagattgatatatacttgtattaatctatttttttaagtggaagataaccatgaaacgttttttatttgcgggcatattgatgcttttttcttttcaaactttcagtgcaccaatatcaacagtcagtaagcttcagtttggtgatgcttggccattcacccgtgaagaagtcatgctaaattgtcgtgctgatggtgcttggtttgtgattaatcccgcaactttagctcaatatccacttaataatattgccatggaacaaatgaaaagtggcaaagttaatgctcaactgattgatagtattctacttcctgatcccaatacacctgataagaaaaaatcactggaagctatagaaagtgcatttttgtctctttgtgaaaaaaactaatcatttgattgagttgcaataaaaaaaacacatttgttatttgtttgatttaaaagataaaaaatgagttatttgattttttataaagaatatgaagtgtggtaggggtgtttactggatctttacatattgttagctattatttaacaataaggttgtgaaatagatgtggcataagcagttttttacacgctattttctcattcagtatcactttttagcgcacggctcgcaatgagccttttccctaagccaggtaaatgatttacctggctttttttatgatgctttaacatgcgattaggctacttttaaaatccaatggtggttttctttgtcataggcatgacggtaaagcagaatatttttatctttcagttgcgcaggaatgctggtgttttcatcccatccatctaattgcatacaaaactctttatcataatcacatggaatatgaacataagtgagttggttatcggaagagtgtttcaaagtaacatcttcaatttcataacaagcaatttttaaggttgttttattcatgttatagctccaaggttatgcgatgttgtgttgtgctttcatagtttaagcttaaaagtgaacagcatggtgagcactttttaatcggatagttttaagcatagtataaatggaagtcatttccaaagtattttttagcaataaaaaaaacggatcaaattttgtgatccgttttaaataaatgtgttaaataaagttgatgatattaccgtttatggcttaggtattgcagtaccccattcattccactcttttggctctttagcattgagaatgaaattctgctcttgttttgctttagcctggagtggggttgatggcggtgtagcaaatgtaatgccaccacgtataaactgcttaaatgtaccgctgcggaatactccaccagttaaaccaaatgagaagttataacctgatgaaagccaaaactctgtgttattacgtaccagatattgatatttctgactaattctaatgtggatcaatactctgtcagacatattacctaattctagtccggttaccgcacctacttctaaaccacgataatagataggtgtgccaatttgtacagatcctgcttcagtcgcatttaatacaaggttaaggccgtctagataccgagagtcggtaatatttgccgtttgtaattcaaatatgcggtatacgccaccattgcctggctctgccttgatataaggctgaataagagaatctaaattatcgaggcctgaagcggttaactcaggggtgactaccgcaaatcggcttcctgaacgtgcaaaagttttcacatattcagggtagagtaccgctgatacactcaccgcttttttatccgcagaaagggttagcgtttccacctgaccgatatcaatacctagataacgaataggcattccttcagaaagtttactggcatcgtaggtttttaaagtaatttgagcaccaatggctctagcactcgtttcgctaggataaagtttatatcttgaaacattgttattaatattttcaaagttatcaaagcttatcgcgccttttaaggcacggtttagcggcgttgcttctaccgttaatcccgcaccatttaatgaaaccttcgcagcaccttcagtccagaacacactcttttcagtaagcaggtgacgatattgtttagaaatatggacatcaatatcaaattcatccattaaaggccgtacatcgacgatttctccaacttggaattggtggtaaagtaccacggaacctttttgaatacccggtagactagctgctttaagtgtcaaagtgacaggtaactcattgccctcaatacttgctttagcataaaaatcattgcgataaaggcgatattgttctttaggggcgccttggctacccggaataaggtggataccgccttcaagccactcttgaggtgtggctccttggatctcaataccatttaagcccatattgacgttaattcggctattagcgacaaatttgctgttttcgtaaatatagtgtttatattcaggtgcaatgatggcatcgaaaataaccccatcatcactgatgttgcgctgaataatttgtcctatcgtaatgcctctaaatagaataggttgcccggcatctacaccccagctctcttcactggttaatgagataattaatccatcttcaccatataaggctttgcctgcatccacggaagtggcagactgtagcacaaattgttgattttcttgggctgggggactattttccggagaatcaaaggcaatagcaccattaattaaagcagaaacactttccattttaatagaagcaccactctttagattaaagttgccctgaaagccggatacattccaaaaatgactatcttgacggatcagatgagcatattgtttatcaatactcagctcgataaaaataccttgattatctggacgtatggcatagctgtaaactttaccgaccggaactttgcgataataaacttgagagtcgacattaagagagcctaaattatccgccgttaaggtgataatttgttggtttttatcaatgttggctttaggacgaacctcttgagcaacaaattgaaactgcttttccccatctccaggaagcatactgatatagttgcctcccactaaggcatctaatcccgaaacaccagaaagactggcttttggggtaacaagccaaaattgcgtatttttacgtaatgcattagcaaggttttttcgaatatcagcggtaacaatgactcggcgtaaatcattactgagcgtcacgtcctgtacaatacctacatcaacaccttggtaacggataggtgttctccctgaaacaataccagaggctgattgaaaatcgatggtgatttgtacgcctttttcttgccagtgttggaaaagcaaccaactcgcaataaaaatagcgataacagggagtaaccaaaaagtcgaaattttacgtttgcgacgtatttcggcttgggttgcctgtgtgttgttttcttcttgttgcataagtatcccataataaacgactatcaaaccattcaacggcaaggatagtgagaatgacagctgtaccaaaataaaaagctgcaggtcccatagtgaatgtcattaattgatctcgattaattaatgacatcatcagcgcaatcacaaacaggtcgagcattgaccatcggccgatccaagagacaaatcgataaagtttcatgcgcaatagagggtgaatacgtgagttaaaatgaatgctcaatagtaaccccagcataatgattatcttaaagaaaggcacaaagatactggcaataaacacaataattgcaataggtgtattacctgaattaattaaagagagaacgccagaaaaaatagtgtcttcattacgctggccatttaaataaaagattgagataggtaataaatttgccggtaatagcaagagcatcgctgtgatgagtgctgcccaagttttttgcaaactcattggttgacgagcactatagcaagatttacatcttgggcaatggctcgaaggtggctttttaaaatggtaatgacatgcatgacaggttgctggactcgtttttatctctttttgtggataaaactgttgccatagttgatccatattaatgttaataagcattaatagacttaaaaccattaaagctgaaaaagcaactaagccatgaccaatatagattgtggcataatcgcctagttttatggtggcaacaccaaggccaattaaataaacatccagcattacccattcttttagcttacctaacattaatagcacgggacgtaaatttagatgtaaacgagcccctaaatggagatataaaatggcaatgggtagactaagaggagcggcaacggcacaaaaggcaaccattgttgccgttaatggagagccttgttgtgacattaagcgaataccgtcaagaacattggctgatatcatggtccctaataaatggatcttgataagaggttgagtaaaagcgatagacgcgaatatcagcatggtgatagaaagaattaatagccgagttaatgaccaatcacgataggtcgctaacttggcttgacattgtgggcaataggcgtcttcgccgcgcttgaggtctataggaagtgatacgaggtggtcacactcctgacaatgtattgatttgctttctttggtgactaaatcgctcatttatccgcctatttggtctttcttctcgcttatcctagcttaagcccaaaaaaaacctctatactcagtgggtcacaaattaccatttttattatatttacgcttttcattttacaataataagtatctgattttttttgtgcgcttttagtgtgtattatcgtttttttgtagacttattgaaaagtctgtattcaacctcaagataaaataagctaaattacaagatatgttatctattttagttatgctttcgttatgcaaataggatcttctgatgccacaattaaatttttatcaggaactcactgataatttgtcagccttgttgtctggtgaaaatgactttatcgcatcacttgctaataccagtgcattgatttacgagaagttagacaagataaattgggtcgggttttatcttaatgatggtaactcattagttcttggtcctttccaaggtaaagtggcttgtgtcaggattggttttggaaaaggagtctgcggaacggcattctcagaaaacaaaattctaagagttaatgatgtgcaccaatttagtggacacattgcatgtgatagtgcaagtcagtctgaaattgttctacctttagaggtaaatggacaaattatcggcgttctcgatatcgatagccctatttttggtcgttttgataaaaaagatgaaaatgggcttaaagcgttgtgtgacgtgctctgcgagcatttaaaaacgtgtcataccgcaaaatattgtgaattttgtgtaagataacaggcgtttgccgtagaaattgttggcaacactattataatgtcgcttgttcatgcctgcgctggttggcaaaaccgttgtaatcaggaaatttcatggaaaatcaacctaagttgaacagtagtaaagaaatcatcgcttttttagcggaacgtttccctaagtgttttatcgctgagggtgaagcacgccctttgaaagtcggtatttttcaagatctcgttgagcatctaaaagatgaaactcagctgagtaagacacagttacgttctgccttacgcttgtatacctcaagttggcgctacctttatggtgtaaaagaaggggctaaacgtgtcgacttgaatggtaacgactgcggagagctggaagcagagcatattgcacatgctcgtacacaattagccgaagcgaaagcgcgcgttcaagctcaacgagctgagcaacgtgctaaaaagcgcgaagctgaaggtgataaggagaccagtaaacgtccggcagcgaaaaagccaaatcctcgtcgtcaagcacctaaagacggtgaaaaacgacagcctcgccctcaaaagcaagctaatcaagcgcctcgcaaagcgccacgccaaaatactgaaaagttaaccccagtcaaagacatctcagtgcttactgtaggtcaatcgctgaaagttaacgttggaagtagcgtgatggatgcgacagtgctagaaatagcgaaagagggtgtacgtgtacaattgcctaacggtttggcaatgaatgtacgcacggaacatttaaagttctgatacggaggccaaccagagcatgaacaaacttttaaatgtggcttttgctatcggattagcgttaacaggcacttctgctgtcatggctgataaaccagccacgccagccatggtgactattaatcaattaccgacattaaagcaagagccacaacattccacagtgagtgaacgtgtcaccgctcgttttgaacgttcccactatcgtcaattctcgttagacgcgagtttttccgaaaagatttttaatcgttatcttaatttattggattatagccataacgtattattagcgtcagatattgcccagtttgataaagataaaactaaagtgggtgaatatttaaaaacaggtgaattaggtcctttatatgatctgtttaaccttgcgcaaaaaagacgttttgagcgctttcaatatgctttaaatcgattaaatcaacctatcgatctcactggacaagataaatttcagttagatagaaccaaagcgccatggccgaaaacgcaagctgaattagataagctttgggatgaaaaagtaaaatacgactggctaacacttaaactctctgacaaaacagatagtgaaatcaaagaaacactgacaaaacgttataaagctgcattacgtcgccaaacacaaagccaaagtgaagacgtattccaaattatcatgacggcttttgcgcgtgaaattgatccccataccagttatttatcaccaagaaatacggaagcctttgattcagaaatgagcctttcattagaagggattggtgccgtattacaaatggatgatgattatccaatgattaattccatggtaacgggcggaccggctgctaaaagtaaagcgctaaaagtaggtgataaaattatcgctgtcggtcaacataataaacccatggttgatgtggttggttggcgcttagatgacgttgtcgcgctaatcaaaggccctaaaggtagccaagttaaactagaagttatctctgatgaaaaaggggcgaagccaagaactatcactttaacaagagaacagatccgcctagaagatagagcggtcaagttaaccgaaaaagtgattaatggtgataaaatcgctattttagatattcctagtttctatgtcggtttaactaatgatgtgaaaacccaactacaaaaagtggctaaagacaatgtatctgctttagttattgatttacgtggtaatgggggcggtgcgttaacggaagctattgcattatcaggtttatttattccaagtggtcccgtcgttcaagtccgtgataataatggtcgagtacgccaggattatgatcgtgatgatgttgtctattataaagggccactagtggttatcgttaaccgctttagtgcttctgcttctgaaatttttgctgctgcaatgcaagattatgggcgcgcattaattgtcggtgagcaaacctttggtaaaggaacggtgcaacaatatcgttcattgacacgagtttatgatcagatgttaagtcctgattggcctagtttaggttcagttcagtacactatccaaaaattctatcgtattaatggtggaagtacccaattaaaaggggtgacaccagacttgttattaccaagctttgataattcagaaatgggggaaagcaatgaagataatgctttaccttgggacagtattccaccggctaattataagctgtctgagtattcagagaaaataaaacaagcactacctacattgacggatcaacatgctaaacgtatcgcgaatgatagagagttttcatatatctttgacgacatcaagcgctacaatgaagctaaagccaaaggtgaagataagtttattattcttaattttgcagagcgcgaaaaagagaataaagagctagaagccataaaattacagcgtattaaccaacgtcttaagttagagggtaagccaccactaaaatcacttgatgatttgccgaaggattatgaaggccctgatccttacttagatgaaacggctaatattgcggatgatcttgcaaaggtattaaaacctaagaagttattaaattaagtttttctacttaagaaagtgatccaaatttacccccaatagttgattaatcaattattgggggtttttatttccctatatttgtctaaaaaagtatctggtatctaatgctttataataaccttagttatatctttagtgagaaaatcgcctcatactattatttggctatttttctcagtagttatatttggttaccagtaacataaggattcattaagatatttaactgcttttatataaaaatattcttaatatcatgtaatctaagtttttatttgaaatctatttgatactagctttgaaaaatataaataaatggaatgcaaggaggtttagataaaaaatcttttataaggtaaataaaaactagatttttatctattaaataagataaaaaaataaatgccttattaaatgtgattaaattcacatttaatggtttacttattgcaataaatgtaacatgttgtgacaatgatcgctctagttgacataaaattacgatagcatacagatcataaaattttgtatcattctgacatactaaggtaatagtaacagattaaaaatctcacccaaatgctaagtgcaaaatctcttctcatcggcgcagttatataaacgctagatgcgctaattttagaatagattttctcattaaggattaatgactagaaggtaagttatttataatttgcttaagcattttattgctcaaaaaagtaaataacaatgtggtgagatgactacctagcattattgatgctaaaaaaatagcgatttggcttaagtttatacaatttaagcgagcgttacttttagctaaatataaaaatagtactttgtttaacttattgaatataaataaatttaaatagttattaaccaggttgaatttaaaatgaaactaaaaagaatggtgttgtttatgttttccccttgttttttagctgtgagcgctgctaatgctgggaattgggaaaatacaattaaagaaagctcatttatttctgattctgaacttgagctgactaccattaatatgtggaaatacctaaaaacagaaaaccgttttgataaacaagagcaacgttatagaaaacaagttgctaatgcttggggtcaaaacttccaagctgatttcagatctggctatttaggtggcattctaggattcgatgtttcttattatggtggtattaaattaggagcaagtaaagacttcgcttctcgtgccatattatataatgatgatggtgaagcaaaaggctataacaaaattggtcaacgttttgcaaaagtgagattcgatttagatcctgttttaattaatggtaaagcgggttggtttaccttgaagaatacaggtatttttactaactcacagcgcttatcattaaacagttataacggttattacactaatacggcgatgggtgattggagtttagatttgctgtatctcgacggaaaagttatgcgtcgtgatagcccaaatatcgatagaatgtatttcagtgatggtaatggtgttagacataatattgaccatgttattactggtggagttaactataattccaaaccattaaaagtctattatttctatggtcaggcggatgatgtattccgtcaacacggtttagaaacaaaatataagttaacatcagacgttactctaggtggtgttgtttattaccacgattatggcagtgaaggaaaacgcacattaaccaatgctaatgcaggtaaacgtaactttgataaggatgcatggcactttgctggtactatggaatggcgtattcctgaatcagcgtggaccattcgtacgggtgtgacttataccgatgcgaaaaaagccaatggtgttggtcaatttgcgcgtaacccaattgggaatactcgtggacgctttaactcaccggcttatgcagatattgactatgtgcgtgatggtgaagtgatgggggcattagaagctgcatacaaagttaacaatgagttgtctgttggtgcacggactaactatagtgaatttagttactccggcgaaagattaaaacaagggcagtttggcttatttagctactggaagccaacggctaatctttctatttctttaagtggcggtattggttggcaccatcaacaagaaaatgattacaccacaccaaaactgtatgatggtcactcacgacgtgctcactcattatcaggctctatgacaacgacatatcgttttaaaatgtaattgtttatagggtaagggataacagaattcatccctgtataggtgcatggcttgcctgatggtgagccatgtacaaaaatagataaagctgacatccaaacctttaatctaacaaaacgccttcaattaatttattttgttaaaatttcatcactaggcatttatttttgggcctatcttgcctagactgttattcctcctctatgtgaaaataatcctccataatttagctattaattacattttcttttattaaaatgtaaagttatatcgtttttagtagcaaacaagttaaaagacttgataaaataaaaaaaagccttatttataagatagtttttgcaatgtggtaattagataaaataggaacagtatcaatatgatgaggattgccttattcctgttaacaaacttagctgtcatgtttgtgttcgggatcatcttatctttaacaggtattcaaggccgcagtgttcagggtttaatgatcatggctggcctatttggttttggtggtgcatttgtttctttacttatgtcaaaatggatggcattacgatccgttggtggtcaagtgattgaaaatccaacctctgaagtagaacgttggttacttgatactgtaagacgtcagtctgagcaagtggggattaaaatgcctcaagttgcaatctacgatgcaccagatattaatgcgtttgcaactggagctcgtcgtgatgcttcgctggtggcggtgagtaccggattattagccagtatgagccgtgacgaagcggaagctgttattgcacacgaaattagccatgttgccaacggtgatatggtaacgatgaccttgttacaaggtgttgtgaatactttcgtgatctttatctcccgtatcattgctcaatttgtggcgaattttatttcgagcgatgaagagagtgaaaacagtaacggaaacccatgggtatacatgggcgtttctatggtgcttgaaattgtttttggcattttggcaagtatcattacgatgtggttctctcgctaccgtgaattccatgcggatgcaggctctgcaaaactggttggccgtgagaagatgatagcggcattacaacgcttaaaaaccagctatgagccacaagaagagagcagtatgatggctttctgtattaatggccgtaataagtcatttagtgaattatttttatcacacccgccattagataagcgtattgaagcactacgtagtggcgaatatctcaagtaaaagaaactattagcgataaataatttttaattatcagtttacaaatgccagagacagaaatgtttctggcatttttgttggtgatccattagctttgattaattcctacaatcgcttttcgttttatttaacagaccgttctggttcagccaaatatcctcatctcttaatatttttataggtattaagttaagcctcagagctagtgatgcatgatcatcatatctattgatagataaaaggcagttaaattaatatcaaaataaaaaagccagtttaaaattaaactggctttaagagatttaacttaattgttaatgtggtttacttcacattaagttcagcttcttcttcctgattaaagatctctttatctgtttggcgcatcatttggctagtaatagtacctgcggtcatagagccactaacatttaatgcagtacgacccatatcgataagaggctccacagaaatcagtagggcaaccagtgtaacgggtaatcccattgctggtaaaacgatcagggctgcaaaggttgcaccaccaccgacacccgcaacacctgctgagctaatggttacgatacccaccaaagtggcaatccaaagaggatcgaaaggattaataccgactgttggtgccaccataacggctaacatagcaggataaataccggcacaaccattctgaccaattgtcgcaccaaaagacgatgagaaactggcaatcgattcaggaacaccaatgcgacgagtttgtgtttcgatatttaatggaatactggctgcactcgaacgacttgtaaatgcaaatgctaataatggtcctgcttttttgaagaatttaattgggtttaagccagtaaatccaactaataaaccatgaacgacaaacattaagcccagcgcaacataagaggcaacaacgaagctaccgagttgaataatgtcatgcagattggagcttgccacaactttagtcatcagtgccattacaccgtaaggtgttaatgccataacgatacggactaacttcatgatccacgcttgtaagctatcaatcgctgctaatactttttcaccgcgaggtttatcttctttaagcagttttattgcagccattcctaggaataccgcaaagataactacactaataatcgaggttgagcttgcaccagttaaatcggcaaatggatttttaggaataaaagataaaattaattgaggtacagttaagtcagacactttacctatataattatgttgaatagcggctaaacgctgcgcttcctgttccccttgaacaagaccttccgctgttaaaccaaagatattggctataacaataccaataagagcagcaattgccgttgtaaatagaagtgtaccaatggttagtgcactaatttttcccaatgatgatgcttggtgtaaacgtgatactgcacttaaaatagaagcaaataccaatggcataataatcatttgtaacagttgcacgtaaccgttaccaacgatgttaaaccaaaggatagattctttaataataggatcgtgtgcgtcatagaatgcatgtaacgccagcccaaacaccaccccaaagaccaaaccgacaagaactttctttgacaggctccactgacgttggcttaatttagccaagatgagtaatagcacaacaaagacgagtacgttaataattaacggaaaattcatcttaactctccaacgagatttttatatataaatttggcgattgtatgcgatatgagttcttaggtaataagaaaggatataacagcatcaactcgctatatggtaacagtattgttaataactttttataatcaattattcttttatatagtcgtttagttataaaaacaaggaagattggtataaaaaagactaattaactataaatagatagaggaaagtagagaactgtcaaggagagttaaaaaggtgtacgtttatcgtggtacatttgtaaccagtgatttatttgtgtgggaagagaaaaagttaggtgtgggggcagaaatagtgcaccaactaagatgatgacagaaataaatcgttctccttttttgctattttttttcgctaaaatcggtaaggcaaaacgcatttttagtggccataaaaaaggtacacctgatggtgttagcatatctgccagtaggtgacttaagtaacctagcaaaagggcgtgaaaaaaatcagccgaaatcgtgatataaggcgcaacttgtgtttcccataaaatggctaaaccacaaaaggcgagtaggctatgtgtgaagccacgatgaccacagagttttgatagcggtaatgagattatccgaaagaggcgtcctaatatagagcctggatgatctaaatctggtagtagtgaacctaataagacagcagggatcatgtgaaaccaatcaccttgagcaagaacgggggttatttctaatttctgtgctaagacgagtgttgcaacagaaaaaagtaaatgtccttcggctgtcattccttatctatgcctatatgcggtttttaccgcttgctgttcatttatacagtgcttaagtataaaaggtttttacagcaactaacagacataaaagataaaaattgccttaattattaagcaataacagaaatattttattcggatgtgttaaaaataaccaaattttagataagggatgagaattaatatagaaaaaggatatcgacaacaaatgatatccttctataaatttttataggctataaccaaagtcgttagcctaataattgagatttggttaattcgttgagagaggcaattttaacatcggctaatccccaacatttgtcattaaactgctccgctgcaggcacaacaattgagcgcattcttgcagctttgcaagcaatcataccattgcgtgagtcctctaaagagacacaattaatgggtgcgacattaagtgccttagcagcattgagatagacttctgggtgaggtttactgtgcgctaaatcagctgcagagacaacagcagagaagtaatgacgaatattaaataactcaagtacacgctctagcataaaatgcggtgatgctgaggctaaggctatctttaaacctaatgattgacataaagatagggcatgttcaacaccagggagcagcggttttttatcttcaataagttgtacaacgcgagcaatcattctttctttagcttcttgttgtgttacgccttgccaaggtgatacttgataccaaagttcgataacttgatctattcttaagccgacggtgtcgggcatgctgtcagcaagtgataaatcgacacctaattgtgcaaagacctcatgttctgcttgtgcccaaaacggctctgagtcgattagcaaaccatccatatcaaaaatagcggcttcgatgggcaatttaaaagacatgtttactctccataataaggtctatgttgatgaaaaatgattgtagcaagagttgattggaaaatcttttttaatcagtttcttatttcttttaaaaaataaatagagaaaattatagctattaaattattgacatattagccgttaattagattaggatatttaggtgcatattgccgaattctatgagtgaggacaaaatgagttatcaacatgcaggaatatatgccattgtaaaacgtgttattggttggcttatttttattcctgcctttatttcaacgacagtttcgttgattgagttagctgcgatgccaagagcaaatggcgagggtgttaatgctgtaattaatgatttttttcgagtattagcagaaatggtacaatttaacaccccgtggctagactttttttggcgtcattctccagtacctaacactcaaataggttttagccaacagaatattatcttctttgtgatcttctttttaatgtttattggcttagcactgagtgcatcagggttaagaatgtatcgccaagtgaaatatttaaaggaaaatattcaagatcaactaattattgaacgagcactaaaaagtggtattacagcgcaagagctagagcagaatataaaattgccaagacatacactatttactcaagtcatggtgctgtatatttcacctattattgtgatcgcaattggttattttctgctgaaatttttaggctggtagttatctatcacattgacttaattaaaataaacctcgcaggataacatttggcgaggtttatttttatctatcggtaaataaaatcagattgttttagtgtgtgccgagcaaatcatcaatgatttttctggctgctaggtaatctttttcttcaccgaataaatgacagcgattaaggaaatagtagagttggtagataggctggcgtgataggaatttttcagataaaggccagatgctttggtaaccatcaaaaatattggctggcacagaagagcatagcggtaacatggcaatatcacattcgcgatcaccccaataacaagcaggatcgaacatcgttccttcagattgacctatagcagcacaatttttaggccataagttgccatgtaatagtgagggttgtggatgatgatcggctaaacggtgattaatgatttgaatgatttcttctatatcaccgaaaaccatccctttctctgaagcgagttgcaactggataccgatacgcttttccgaatagaagtaattccagcgcttctcccaaccatttgcttgaggtgtggtatctatatgggtatcgaaatcaaaaccataacggggttgttcttcccattgatgcaatttagctaactgttgaccaaaacaatacgcgctgtgaggtgtaaaaggttgcacaggcagaaattctaacagtaagaagctagtatctttactattgccaatgcctaatacgcgaggaatacggatcgtttggctttttgccaacatttcaagctgttctgcttcatttttaaaggtgggcaaaaattcccgtaggttagattttacaaagacagggatctcaccatattgaattttccaagtgtggtgtatatcaccgcttgaaaggtggtgtttttcgctgatctttgctgaaaatcctaaatttgattcaagcaaacgaccaatattctgccacatagattacacctcgcaaagttgtttacttagtagacccaaatagtaacgagcgatgtttatactatgacaataacactttaattaaatcaatacagtataaaactaaaaaacgggatgattatcccgtttttatagtaataaagattttcattaggcattggcgggtttagtttgccgttttatttttgccaatttaatctgattacagagtaatgcaataataaagaacaccgcttgcgtgagtacaatagaagggcctgtggcaccgtcaatatgaaaactgataaatgtaccaataacactcgatataacagaaaaaaggatagcgagagtgatcattcgagagaagcttcgcgttaatagataagcggtgatccccggagaaatcagcatggcgaccactaaaataatcccaacggcttgcatcgaggcgacaatcgttaacgccaaaatagagagtaagccataatgtaataaagcgaccgggagaccgacaattcttgcttgattagggtcgaaacaatacaacataaagtctttttgtttaaccagcataatagtaatagtaattaaacaaatagcactaatctgtataagcacatctggggtgatacctaagatattaccaaataatatatgcattaaatgttggtcagtatctacactagcgaagatcaccaaaccgacagcaaacataccagaaaagacaattcccattaccgtatcttcttttattcggctatgctcttttaaataacctgttgcaaatgagcaaaataggcccgaaagaaaagcccctatcgttaaaggaattgcagtgacataagctaataccacgccaggtaaaacagcgtgagaaatagcatctcccattagtgaccaaccttttaacaccatatagcaagataaaatagcgcaggcgataccaatgataaccgcggcaataattgcacgttgcataaaaggatattgaaaaggttcaatgaaaaattccattaattcattcatagttgcacctcttcttgttgagtaacgtcttttggatgctgggattgtgaaataagtgcttgtgaactttgacgtgcgcggcgacgggctgccaacatgccatgtttaggcgcaaataagaaggctaataagaaaagggcggtttgcattgtgacgataacgccccccgtagcaccattaaagaaataacttagataagcaccaacagcactggttactgtaccaatacaaatagcgataatagcgagtcgtttaaattggtcagtgagtaaataagcggtagcaccgggagtaaccaccatagcaataactaaaatagcgccgaccgtttgtagcgcagcaacggtacatgcactgagcaaggtaaagaagatgatttttagttttaaaggggataaaccaatagagcgagcatgtacttcatcaaaaaatacaactaataaatctttccacatacaaaatagaataagaaaagagacaccagtaatgataacgacttgccagacatcttcatcagcaatgccgagaatattccctaaaataatggtctgaacgttgacggcagtagggtttaatgaaaccagcaacagaccaaaagcaaaaaaagtagaaaaaataaagccaatcaccgcatcttcacgtaatcgtgtgatgtgacgaataaaagtcattgataaagcagcaagtagacccgtaaaaaaagcacccactgcgtatggcaaccctaaaatataagcaccggcaacgccgggaacgacggagtgggagagggcatctcccattaatgaccaacctttaagaataaggtaagaagataaaaaggcacagacagcaccaactaaggcacttacccagatagcctttaccatatagttatactcaaaaggttgtaggagtaattctagcatggctaatctccttgtttacgcttactttgatgagcgggagtatgttgttcatggtgaccatagaaaacggcagcgcgttcatcatcagtaataacggtaagtgaacgtggatcgtcgtcgtcgtgaagatcagggcctgataagctgatatgacgcaatacgccaccaaaagcatgctctaaattcttttgggtaaaggtggtttctgttggcccgctatcaagcactgttctattaattaaaataacgtgatcacaaaactcgggtacactacctaagttatgagttgatactaatactaggtgaccttctttacgcaagttacgtaataattcaataatggcattttctgtttttacgtccacgccagtaaaaggttcatctaataacagtacggtgccttcttgtgccattgctcgtgctaagaatacccgttttttctgcccaccagatagctcaccaatttggcgatgtccaaggcctgataaaccgacacgctctaaacaagcttcaaccacttcatgatcttgtttcgatggaatacgaaaaaaacccatttttccataacgtcccatcatcaccacatcagaaaccagtacaggaaagttccagtcaacttcctctgtttgtggcacataagcaatcatattttgtttaagtgcttgctgaataggttgattatttaatgttacggtaccttttgaaggtttgactaatcccataatggttttaaaaagtgtggatttaccactaccgttgatgcccactagggcacaaattgtgccaccagtgatagagaaacttgcatcataaatagcagtgtgaccgttgttataggttaccgttgcattatcaacagtaagagtaggatttatttttttatcattcattgtccaaatcctttcgcaatggtatcgacagtaatattaagtagatcaatataagtagggacttctccacccggggcagaaagtgagtctacataaagaacgccaccatattttgcaccagtctctttactcacttgtttagcaggtttatcggaaatcgtactttcactaaacacgacaggaatatggtgttctcttacggtatcaatcacgtattttacttgttgaggggtgccttgctcttctgcattaattggccataaatacacttctttaaaaccataatcattggttaaatagctaaaggcaccttcactcgttactaaccagcgtttttcttcaggaatacgcgctaatcttgctcttaatggtgcatcaagttgtttaatttgttcagcgtaacgcgcggcattttggttataaattgcggcattatctggatcgtgttcaacgagcgctttacgaatattttcgatataaattaatgcattgttaggcgacatccatgcatgtgggtttgggttgtttttgtaagctccttcacgaataggcataggggtaataccttcagtgacaacgaccgcaggcacattacgtaattcattgaaaaaacgttcgaaccaacgctcaagatttaacccattccataaaataagatcagctttttgcgctttgacaatatcttttggtgttggttgataatcatgaatttctgcaccgggtttggtgatagattcaacaacggcagcatcgccagcaacattttgtgcgatatcttggataatagtaaaagtcgtgacaacttttagcttatcttttgcctgtgcaggggttataaagaagattgaggcaactaagcataatgccgtaagcgaaattttatttacagagcggaacatatccatattatatagccttataattttcgtggaattctctaactgataatgattatcaatatcatttcaaaaaagtcaagttatctctgtgtgaaagtgaaaatagctatttgataacagctgatactaagataacagcatgtatttcaataaatgttaagtaaattgtcgtctttctttataaaaattaacaatcgatggtaactattggtgtgaaaggttgtttaatactcacaattgatgaaatttacagccaaatcatggcttactgctggttaaggtatctgtttttatgagagaagcttatccttagtccatttttttaatggacagcgttaggtttgtgttttttaataatctcctataaagcatagggcgaaatgatgaggataacgtgtgaagaccaacataatatttcctttggcaattttactgctggcagggtgtgcagatcccaatcaccaaacggcgaaaaaagagacaccgcgatttttaaatagccagcctgtagagcacagagttaataatgcctcaatttctactgctcaatggaaaaacaccccttttgatgagcatattaaacaagcttcagcccgttatggtgttgatgaaaccttaattaaagccattattcaggtagaatctaattttaggccagaagtgataagtaaatcgaatgcggttggattaatgcaaataaaggcatccacagcggggagagatatttatcaaaatagaggaaaagcagggcaaccaaccaccgctcagctaaaagatccggctactaatattgatttaggaactgcttatattcaattattaagagagcgccatttatctgggatctccaatcctgaaacactctattacgcgactattttggcttatgtgaatggggcgggtgcattactcagaacttttgataaaaatagagatgcggcgattgccaaaattaatgccatgagcgcggatgatttttatcgttacgttgaaaaaaatcatccagcatctcaagcaccacgctatttagcgaaggtcaaagcagcctatcatttagcggataacttttctgataagctggcagcagccgctgattgagcttgttgtaataaagcggggagatcagcaatgatttcaagtacaccattaatcataaactgaactcccatgcaaattaataaaaatcccataacacgagaaatagcatcgataccactgtggccgagatagcgcataataccggttgaaccgcgcagtgaaagccaaacaatcaggctaattaaaaagaaagtggtaataggtgcaacgtacaatacccattgcgcaatatctgtacgtgaaggaattgatgctgctgtactgatgatcatcgcaattgtccccggccctgcggtacttggcatggctaagggcacaaaagcaatattgggcgcctgaggatttcgatgcggatttttttcttctgaaagcggatcgtccacattgggagtatggggaaataacatactaaaaccaataaaagcaacgatcatccccccagcaatacgaaggcctggaatagagataccaaaggtcgtcattattacacgacccgcataaaaagcgatggtcataataataaaaatatagacacatgccataaaggattgttgattacgctgttctttggtcatattccccgacagaccaagccaaagtgcgaccgtggtgagtgggttagttagcggtagaagtaaaataagaccaagaccgatagcctgaaaaaactggtaaacagagtacatagagtgtaaaggctcctaacaacaggtaattaaggctaccgatcatagcaaataaatagtaataatagtgttgatattaagaaatatttttatatttataagaaggttatgggtattttttcattaaccactcaagatgtgttttcaccgcttgccaatcataatcggtaatactatagatacaggtatctctgcgttgaccgttggtggttaaacgatgattacgtaatatgccatcgagttttgcacctaaacgctcaatcgctctacgactggtttgatttaagatatgagtgcggaattcaacagcaatacattgtagatcttctaatgcatatttaagtaatagatatttcgcctcggtattaatacccgttctttgtacctcttttgcataccatgttgaaccaatctctactcgaggtgtatggttatctacgttcatataggtcgtcactcccaccacacgctcacggcgtttatcaataacggcaaaaggaagcattactccttgtttttgtaattgtcttttatgctcaatatcttgttttaatgtagtgacagaaggaactgtggtaaaccaaagttcatcaggcctatctttagcaatcagttcacgtaatggtgatgcatgctccatgcttaatggtactaaacgtactaaattaccttctaaggtagtccagtctgttatctttctcataggcgattctctaagtcggtgtattaaatagtttcaaggcaagaatactttttatacataacaaatttattaattggtacgcttattttaacggtgattaaaaatagcttaagaatttgtttttgtataaagagaaaagtaacgtcatgagtgtttaacaacagagaatgacagcttagcaacagggcaggataccgatgtcatgttaatctatacttattcgataatcttaatgaagacatagcaataaaataataggtagcaagatgacagacaccaccaacaccaacaccatcgaatgggatgactttttacgggtagaaatgcgggttggcacaattataagtgctgaaataaataaaaaagcgaagaaacccgcttatgtaatggaagtcagcttgggagagctggggactaaacgctctagtgcgcaaatcaccgtgaattatactcctgaagagctaattggtcgccgagttttatgtgtttgcaattttcctattaagcggattgcagggatcaagtctgaggtgttgattaccggggctgctgatgaaaacggtgctatcgttctcgcagaatttaatttacctgtgcctgatggggctcgtttagcatgatctatagctaattgtccttttcttttaacgctcacagcgattttgttgtagtatttatttcactgtgagcgttaatgtgtaaggggatgttttgttattacctgaattacatttgcgatgttatacacaagatacggtatcacatcagcatgagaatatctggcagatcatctttggcttaaccggaacgatggaagttaatttcaatcggcaagattttcttatttctcaacaaaactatttaattatcccacctaccatcgatcatgcttttgctggtcatctcaataataaaaatcttattttagaacttcctgtcacatcacagtggcgactgaatgaaagagggggaatgtttgccttatcacccgcagcaataggattattagcgtgggtacatcaataccctcaagcgccagaacatcattccactctcgcacgtctgctattagcccaaatgaaagtacaaccaagctggggggataaattagatctctggctagaagataaactgcatatgccattaacagcttctgatattgctggtgcattaaacatatcaatcagtacgctacagcgcaaagtaaaagcggaattaggcatatctattatgcagtatgtgatgcaaaagcgactcgctaaatccgcagagttgctcaaatacacatcattaacgattgaaaatattgctttagcggtagggtatgattcacattcggcttttagccaagcttttcgtcaatactttcataaaacccccagtgaatatcgacagtaaacgacttactgataaaaatgctgacttttgatatgtgatttattaattaattttattaatttatttttttattctctatttattgtggataaatagagaacaacaaggttatattatttgtatagtctttttttgaatgtatttcattgattattaatattttttgtcaaaatctatatgtattgctaaaataatattaactaatatttttaaattggatatgtaagtgaatttaataataaaggggcttctttatcctttttttgttttcttttcagcatatgcattatcttttgggtgcagtgttgataatggatatgatattgagtctggtaattataatatttatgtgcaattagaggctgaagtgcaaccttatcagaatttaattgttgatctctctaggcatttaaaatgttggaatagttatggtggatggcaagatgttgaccatatcaatttagaaccagggacgggcttatctgggccactatttaattttagtggttcagtatattggtatggaaatacatattcattacctttaaatagtgcgactaaagttttacatatcggtgatcttacccctatgccgatgccaatgatgttgtatttaacgcctataaataactcacctgcaggaggagtactcattagatcgggtgaaactattgcaactattaatatgtataaaatagcggattgggatggtggtaatcctaaatattttacgtgggaaatagtgtctaaatatgatgttacaatgccaattagtggatgcgacgttagtagccgaaatgtcaatgttaatttacctccttacccaggcgaagcaccggtcaatttaaatatccactgcgcgcaaccacaaaatatatcattttatctttccggacaaaccactaatgatgatacaacctttattaatttagcaggctctgcaggggaagtctctaaaggtatgggagttcaattaatgcgtaatggatatgtaatccctgctaataaagcaatatctttaggtagagttaattcgtcgacttcattaggcttaaaggcaaggtatggtatgactggcgagcgtgtaactgctggaaaagtaaaatcaattatagatgttaactttatatatgagtgaattatttattaatttaatatctatgattttaattagcgtaaatagcaaatggggacagatatactcgcgcaattaaaagcatatataatttgttgttgctatgataatatcacgcttgagttatagcagtatgccaaagcacttttattatcctaaacactttggtgtacataacttgcagagtgaagcaagtaactgctaataacgtattaaattttaaagtaaaattaataatgcatgtgatcttgcgtatgggtcaccactgtaactaaggattttaaatgccaattattactcttcctgacgggagccaacgtcaatttgaaaatgcagtctctgtcatggatgtcgctgcagatatcggtcctggacttgccaaagcctgcattgcagggcgcgttaatggtgagctggtggacgcttgcgaattaatcgagcaagattcacaactggcgattattaccgcaaaagacgatgaaggtcttgaaattattcgtcactcttgtgcccacttattaggacacgcaattaaacagttatggccacaaaccaaaatggcgattggtcctgttatcgaaaatggtttctactatgatgtggatttagatcattctctgacgcaggaagatttagaaacgttagaaaaacgtatgctagagttggcgaaaacagattacgatgtcattaaaaaacgcgtaacttgggcacaagcacgggaaacttttgttgctcgtggtgaagattataaagtcgctatccttgatgaaaatatcagtcaagatgcacacccagcactttatcatcatcaagaatatattgatatgtgccgtggcccccatgtgccaaacatgcgtttctgccatcactttaaattacagaaaatcgcaggtgcatactggcgcggtaatagcgataacaaaatgctacaacgcatttacggtaccgcttgggctgataagaaacagttaaaagcttatttagaacgtttagaagaagccgctaaacgtgatcaccgtaaaataggtaaacaacttgatttatatcatatgcaggaagaagcgccgggtatggctttctggcataatgatggttggactattttccgtgagttagaaacatttgtacgttgcaaattaaaagaatatgattatcaggaagtaaaaggtccatttatgatggatcgtgttctttgggaaaaaacaggtcactgggaaaactacaaagagaatatgttcactacttcttcggaaaaccgtgaatattgtatcaaacctatgaactgcccaggccacgtgcagatttttaaacaaggtctacgttcttaccgtgatttaccattacgtatggctgaatttggtagctgtcatcgtaatgaaccctctggtgcattacacggtttaatgcgtgttcgtggctttacacaagatgacgcacatatcttctgtacagaagaacaaattttaagtgaagtaaataactgcatcaaattgatttatgatgtatattctactttcggatttgaaaaaatcgttgttaagctgtctactcgtccagaaaaacgcatcggtgaagatgctttatgggatattgcagaaacagacttagcaaaagccttgactgataacaatattgaatttgaatatcagccgggtgaaggggcgttttatggccctaaaattgaatttacactttacgactgtttagatcgtgcatggcagtgtggtacagtacagctggacttctcattgccaggtcgattaggcgcttcttatgttgctgaaaataatgagcgtaaagtacctgttatgcttcaccgagcggtgttaggatcattagaacgttttatcggtattctaactgaagaatacgcaggattcttcccgacttggttagcaccacagcaggttgtcgtgatgaatatcacggatggacaggctgattatgtacaaaaactcgtcaaagaattgcaagatgccggaattcgtgcaaaagcagacttgagaaatgagaagattggctttaaaattcgtgaacatactttacgtcgtgttccgtacatgcttgtttgcggtgataaagaagtcgaatcaggcaaagtagcggttcgtactcgtcgaggtaaagaccttggcagtatcgacgttaacgattttaaagaaaaacttctgcaagaaatcagaagcagaagtcttcatcagttggaggaataaggtattaaaggcggaaaaagaattcaatcaacgcgtcagaatcgtatcaatggtgagattcgcgctcatgaagttcgtttaacaggtttagacggcgaacagattggagttgttagtctgaaagaggctcttgagaaagccgaggaagcaggtgctgatttagttgaaatcagtcctaatgccgagccgccagtttgtcgtattatggactacggcaaattcctctatgagaaaagtaagactctcaaagaacagaaaaagaaacaaaaggttattcaggtcaaggaagttaaattccgtcctggtacagatgaaggcgactatcaggtcaaactacgcaacctgattcgttttcttgaagatggcgataaagccaaagtcacactacgttttcgtggtcgtgaaatggcacaccaacaaatcggtatggaaatgcttaatcgcatccgtgaagatttggatgaactggcttctgttgaatctttccctaataagattgaaggtcgtcagatgatcatggtgctagcgccgaagaagaaatagttaggcaattcaagtaatagcgtcagtctttattgactgactgctattcgccttattattttatgttattaacaatgcgaagtggattatagaaatgccaaagattaaaacagtacgcggtgcagctaaacgctttaaaaagactgcaggtggtggttttaagcgtaagcacgctaacctccgtcacattctgactaaaaaatcaactaagcgtaaacgtcatttacgtccaaaaggtatgatctctaaaggagatttaggcctggtcgtagcttgcctaccatacgcataagtatcagtttttttaacagaattatagacattaggagtgttatatggctcgcgctaaacgtggtgttatcgcccgtgctcgtcacaagaaaattttaaagcaagctaaaggttattacggtgcacgttctcgtgtatatcgtgtagctttccaggctgttatcaaagctggtcaatatgcgtaccgtgaccgtcgtcagaaaaaacgtcagttccgtcagctgtggattgcgcgtatcaacgcagcagctcgtcagaacggcatgtcttacagccgtttcatcaatggattaagaaaagcatctattgaaatcgaccgtaagatcctggcggatatcgctgtattcgacaaagctgcatttgctgctttagttgaaaaagcgaaaggtgctctggcttaattaagtcaatggaagagggagttaactccctcttttattttgtctaaatttgtggcttaatggtaaaattcaataagttacacataatgagaatgtctcaatgttaaatatcgcttttttccgcttctttttttactttagcgcctaattttgggggcttttgcgcgtaagaaaagaaacgaaaagtagcgccggagcctccattttggaggcttttttgttttcagtactcaaacttgagttcagaaatcaaaagggcaattttttaatcgtcatcattgataacaactaatagacctcatcaggtcaaaggaagaggaaacgatgccacatctcgctgaactcgttgctcaagctaaagcagctatcgaagaggcacaggatgttgctgcgctggattcggttcgtgttgaatacttggggaaaaaaggtcatttaacgctccagatgtccacgctgcgcgacttacccgctgaagagcgtccagctgctggagcggtcattaatcaggcaaaacaagaggttcagcaagcactgaacgctcgtaaagaacaaatggaatcagcgctattaaacgaacgtttagcggctgagaaaattgatgtctctttgcctggacgtcgtattgaaaatggtggtctgcaccctgttactcgcacaattgaacgtattgaaactttctttggcgaattagggttctctgtggaatcaggccctgaaattgaagatgactatcataactttgatgcgttaaatattcctgctcatcaccctgcaagagctgatcatgacactttctggtttgatgctaaacgtttattgcgtactcaaacctctggtgtacaaattcgcactatgcaaaataaacagccaccgatccgcattattgcacctggccgtgtttatcgtaatgactatgaccaaactcatactccaatgttccatcaagttgaaggcttaattgttgataaagacattagcttcactaatttaaaaggaacactgcacgattttctgaaaaacttctttgaagaagatatggaaattcgcttccgcccatcctattttccatttacagagccttcagccgaagttgatgtaatgggtaaaaatggcaaatggttagaagtcttgggctgcggtatggtgcatccaaatgtgttgcgtaatgtaggtatcgatcctgaagtttattctggttttgctttcgggatgggtatggaacgcttaactatgttacgttacggtgtcaccgatttacgttcattcttcgaaaatgatcttcgtttcctcaaacagtttaaataaggtgggattatctcatgaaattcagtgaactttggttacgtgagtgggtaaacccagcaattagtagcgaagagctttctgaacagctaaccatggctggccttgaagttgatggtgtagagcctgttgccggtgattttcacggtgttgttgtgggtgaagtggttgaatgtggacaacacccaaatgcagataaactacgagtgacaaaagtcaatgtcggtggtgagcgtttattggacatcgtgtgtggtgcgccaaattgtcgccaaggcttaaaagtcgctgtagcaacggttggggcggtattaccgggtaactttaaaattaaagcagccaaactacgtggtgagccttcagaaggtatgctgtgctctttttctgaattagctatctcagaaaaccatgaaggcattatcgaattacctgctgatgcacctatcggtaccgatattcgcgaatacttaaaattaaatgataatgcgattgaaatcagcattacaccaaaccgagcagattgcttaggtattatgggggttgctcgcgatatcgcggtcattaataaaatgacatgccaactccctgatatgtcaccaattgcagccacttcttcagcgacatttcctgtgcgagttgaagcaccacaagcttgtcctcgctatttaggtcgtgttttcactaatgtgaatgtgaaagcgaacacaccattatggatgcaagaaaaattacgtcgtggtggtattcgctctatcgatcctatcgttgatatcactaactttgtcttacttgaaatgggacaaccattacatgcgtttgatcttgaccatgtcgatggggctgtggttgttcgtatgggcaaagagggtgaaaaactaactttacttgatggtaatgaaattaccttaaaagatgatgtactggttattgctgatgaaaaacaagcattaggaatggcaggtatttttggtggtgaatcttctggtgttaatgaagaaactaaaaacgtatttttagagtgcgcattcttctctccattagcgatcaccggccgtgcacgtcgttatggtttacataccgatgcatctcatcgttttgagcgtggtgttgattcagagctacaatatcaggccattgaacgagcaacgaaattattactcgaaatttgtggtggtgaagtgggtgaaattattgatgtcaccaatgacagctatttaccccatgttgctcctatcaaattaacacgtgcaaaattagaccgtttattaggtcatgttattgatgatgaacaagttgttgattcgttaacacgtttaggttttggcgtcaccgttgaaaatgacgggtggttagccactgtgccttcatggcgttttgatgttgaaattgaagaagacttaattgaagaagttgcacgtatttacgggtataacaatattccagatgtacctttacgtgccgatctgattatgacagaccaccgtgaagcggatctgccattaaaacgtgtaaaaaccatgctggttgataatggattccaagaagctatcacttatagctttgttgatccgaagatccaaagcttactacatcctaatgaagaagcgttgatcttacctaacccaatttctgccgatatgtcagccatgcgtttgtcattgttgaccggattattaaccacagtggtttacaatcagaaccgtcaacaggctagagttaggttatttgaagcaggtctgcgttttgttcctgataatcaagcagaatatggaatacgtcaggaacttatgctagctggtgtgatcgcgggcaaccgttatgaagaacattggactttagagaagcaaactgttgatttctttgatttgaaaggtaatattgaatcaattctggaattgacaggccagttagatgaaattacatttaaaccagccaatcattcagcgctccatccgggacaaagtgctgagatttatctgagaaatgaatatattggctgtattggtgttgttcacccagagcttgaacgtaaacttgatttaaacggccgtacggtagtattcgaaatacgttgggacgcaatcgcaaaccgcaatttaccgcaagcgaaagctgtttcacgtttcccttcgaatcgtagagatatcgctgtagttgttccaaatgatgtggctgcagaagatattttagctgaatgtaagaaagttggcggaaatcaaatagttggcataaacttatttgacgtgtattgtggtaagggagtagcggagggttataagagcctcgctattagcttaatcttgcaggatatcgagcatactctggaagaagatgagattgctgccacagtcaatacctgtgttgcagcattgaaacagcgattccaagcatccttgagggactagacctatggcgcttacaaaagctgaaatggcagaaaatctgtttgaaaaacttggcgttagcaaacgcgatgcaaaagaccttgtagaagccttttttgaggaagtgcgtcgttctctggaaaatggagaacaggtgaagctgtctggattcggaaactttgacctacgtgataaaaatcagcgcccaggtcgtaacccgaaaacaggggaagatattcctattacagcccgccgtgttgtaactttccgcccgggacaaaagttaaaaagccgggttgaaaatgcgacaccaaaagagtaatacttaaacaccaaaacggctttctattgaaagccgtttttttttcgacttacttctacgatttactccttctatttttcttttgcttatctgtgataagcgcctaatagtcattttattgtttaaataagatgtgcttgaggggaataatcattggtttaaaattaatcatactggaaggtttatttccttaggatagaaaattatattttcttcattgaaagggactgtgttatgttgccctacatttattagcaatatatttataaaaatagcgtaatttatgggctatttactaaacaatatgaataatcaatatgatgatccgcttaatcaattacgacacaaacagcaaattagtgataagctaaaactcactttgctggtgttagttttatttgttcttattgttatctcactttcagccggtgaaatttggttattccccaataaatggctcactgaagaagctagtttatttatttggcaaattaggcttccaagaatattggctgtgatgatggttggcgcaagcttagcgattgctggtgccattatgcaggcaatctttgaaaatccgttagcagagccgggacttttaggtgtaagcagtggtgcgggtgtttgtgttgtgttactgattgttttccaattaggaactgcatactggttaataagcagtgccgcgatattaggggctttggggatcacctgcttattaatgtttttctcacaaataaaaaaactatctaatgctcaattattattaataggcgtagcattaggggtattagcaagtgctgttatgacttggctggtctattttagctctgcgttagatttaagacaattaatgtactggcttatggggagctttagtggcattgactggcgtcaccaaatattattttgggcattacttccaatcatcacacttcttatttggcaagccgatattttaaattacctttctctggggagttttgaagccaaaaaactcggcatttctgtgattatatggcgtaattggtttattttaaccgttggtttattaattggttttagcgttgctctagccggcgcaattagttttgtcgggttgattgtaccgcatttattacgattgtctggtatcacacattataaaaccttgttaccgggctgtgctttaacgggagcgagtttactgatattcgctgatttaatatcaaggctgatgttaaatggcgcagaagtccctattggcgtgataactgccaccttaggcgcacctctttttatttggttattagccactaaacagatggagcgcttataatatggcacaattaaaactatataaattagctgtcaataaaagactatatggtattactgaacaagttaatgatggcgaacgcattcatttaattggcgcgaatggggcgggtaaaagtacgttgttaatggccattgctggtgaagtttcatacgttggaaatatatttttaaacgaaacttcaatgagggattataaaattgccgaactttctagaatacaaagcgttgttagacaacaatcgttagctttgccatttatgccagtgtttcattatctttctttatcctatcagttatcaaaaatggatattcaagaattgaatgcactattaagcgattttcaaatcaataaattattgtcaaaaaatattcatcatttatctggtggggaatggcaacgcgttcggattgttgccacttttatacaattatggtcaagcgatgatttaacaggaaaattaatgatgcttgatgagccgacaaataatttagatattgtacaacttactttattggataaatggctagataaattttgtctacaaggtggcagtattattatgagtactcatgatttgaatcattcttatctaaaagcagataagttatggtttatgttagagggaaaaataatcaactcaggtgactcagcacttttgttggatgaaaatttattatctactacatttaatactaagattagatgtaatagatcagcaaatagtgtaatttggcaagtaatagagtgatgttattgagtcagagtctgcgcatcggaaattattaagccttctttaaggctttcttaataacaacgggtgctgtgaaacagcaaattgtatataattagtttttattcattcattaattaggctacatctttatgagtcactttcttccattctcccgtcctgctatcggggatgaagagattaaagcagttgaaagcgttttacgctccggctggatcacaacaggtcctcaaaatcatcagctagaacaagatttttgtgaaaaatttggtagcaaacatgctattgcggtttgttctgcaacagcgggtatgcatgttgttttgatggcgatgggaatagggcctggtgatgaagttattacaccttcccaaacttgggtatcaactatcaatatcattacgttattaggcgcagagccagtaatggtcgatattgatcgtgacacattaatggtcagcgctgaatcggtaaaaaaagcgattaccccaagaaccaaagcaatcatccctgtgcattatgccggagcgccttgtgatcttgatgcactcagagcggttgctgatgaggcgggcattcctctgattgaagatgcagcacatgcgataggtactcgatataaagatgaatggataggtgagaagggaacttctattttttcttttcatgccattaaaaatgtcacttgtgccgaaggtggattagttgttacggacgatgatgaattagccaatcgagtccgttgcttaaaatttcatggtttgggtgttgatgcttttgatcgtcaagtccaaggacgtaaacctcaagcggaagtcgttgagcctggttataaatataatctctcggatattcatgctgctatcgcggtagtgcaattaagtcgcttagaagaaatgaatgctaaacgtgctgagttagttgccctttatcgtgaaaaacttcaagattcaccattggaaatgttaagtgtgccggaatatccacacttacatgctaaccatctctttatggtcagagttgataaaaatgcctgtggtatcgatcgtgatacatttatggaaaaactcaaacaaaaagagattggtacagggcttcatttccgtgctgcgcatacacaaaaatattatcgtgagcgctacccttcgttatcccttcctcaatcagaatggaactctgcaacgttatgctcgctgccgctgtttcctgatatgagcaataaagatgttattcgcgttgtcgatgcgatcaatgaaattctttcggagcatatctagtgtcaacatttgaaaaaatcaataaagtatcagtcgttattcccgtttataacgaggaagagagtctcccacagcttttagagcgaacaatcaaaagctgtaaacagttagaacaagagtatgagctgatccttgttgatgacggaagtagcgataattcagcaaaaatgctagaagaagctgccaacattgaagataaccatgttattgcgattattttaaatcgcaactatggtcaacactccgctattatggcgggttttaaccaagctgatggggatttagtcattaccttagatgctgatttacaaaacccaccagaggagatcccccgtttagtggcaaccgcagaagaggggtatgatgttgtcggaactcgacgccgtaaccgtcaagattcgtggtttcgtaaaacggcctctaaaatgattaatgccatgataaccaaggcaacaggtcgttcaatgggggattatggttgtatgttaagagcatatcgtcgtcatattattgatgcgatgttgcaatgccatgagcgtagtacttttatcccaattttagcgaataccttcgctcgtcgtacgattgaaattgaagttgctcacgctgagcgtgaatatggtgattcaaaatacagtttcttaaaactcatcaatttgatgtacgacttattaacctgtctgacaactgcaccattacgtttattaagtgtcgtaggtagtgtgattgctgttgccggctttttacttgccgtattattgattgtactacgacttattttcggtgcaatttgggcggcagacggagtgtttacactctttgctatcttattcatgtttatcggtgcgcagttcgttgcaatgggtctattaggtgaatatataggccgaatttataatgatgtaagagcgcgtcctcggtattttatccaaaaagtggttggcgttaaaaaacccaacaaaaatcaggaagaagactaatgaaagcaatagtatttgcctatcatgatattggctgtgttggtttaaaagcacttgaaaaagcgggtttcgatattcaagctgtatttacccatactgacgatcctaacgaaaatcatttcttctcatccgtagcgcgtgttagcgcagaaatgggattaactgtgtttgctccagaaaacgttaatcatccattatggattgagcgtattcgtgagatgaagccagatgtcattttctctttctattatcgccatatgctaagcgatgagatcctgaatttagcacctaaaggtgcatttaatttacatggctctttattacctaaatatcgcggtcgtgcacctatcaattgggccattgtcaatggtgaaactgaaactggtgtcactttacataaaatgacggctaaagcagatgctggtgatatcgttgcacaagaaaaagtaacgattgaagatactgatacttcattaattttacatgaaaaagtcagagaagctgcggcgaaattaatggctcatacgttaccgcatatcgcctcaggtaactattcaacaacagcgcaagatgaaagccaagcaacttattatggccgtcgttgtgctgatgacggtttaattgactggaatgcagatgctaaaacggttcataatttagttcgcgccgttactgaaccatacccaggtgctttcactttcttaggtgagcgcaaaatgattatctggcgtgcacgtccagtggcagataaccaaggtaaacgtccgggtactgttatttcaactgagcctttagttatcgcatgtgcgaaaggtgcaattgaagttatcacaggtcaaagtgaaaatggtctttatgttcaaggcagccgtttagccactgaaatggggatcgtgacagatgtacgcgttggaccaaaagcaacagcacaagtgaaacgtcgtcaacgtgtactgattttaggtgtcaatggctttattggtaaccacctaaccgagcgtttattaaaagatggtaactatgatatctacggtatggatatcggttcatcagcaattgaacgctttattggtaaccctcgtttccactttattgaaggtgatgtcagcattcatacagaatggattgaatatcacatcaagaaatgtgatgtgatcttgccattagtagcgattgcaacaccgattgaatatacccgtaatccattacgtgtatttgaattagattttgaagagaacttaaaaattgttcgttattgtgttaaatacaataaacgtattattttcccatccacatcagaagtatacggtatgtgtgatgataaagagttcgatgaagataattcacgcttaatcgtcggtcctattaataaacaacgttggatttactctgtttctaaacagttattagaccgagttatttgggcttatggtgctaaagaagggctgaaattcactttattccgtccatttaactggatggggccacgtcttgataacttaaattcagcgcgtattggtagctctcgtgcaattactcagttaattttgaacctagtggaaggttcaccgattaaactggttgatggtggtgagcaaaaacgttgtttcactgatattaatgatggtattgaagcattattccgcattattgaaaatcgtgataacaaatgtgatggtcagatcatcaatatcggtaacccaactaacgaagcaagtattcgtgagctagcagaaatgctgttagattgctttgaaaaacatgagttacgcggtcacttccctccatttgctggcttcaagaaaatcgaaagtagcagttactacggtaaaggctatcaagatgttgaacaccgcaaaccaagcatcaaaaatgctgagcgtctattagattggaaaccaactatcgaaacacgccaaacggtagaagagacattagacttcttcttacgtggtgcagttgaagagttaggtaataagtaatgaagaaagttggcttgagagtcgatgtggatacttatcgaggtacaaaagaaggtattccacaattgctggatgtctttaacaagcataacattcaggccagctttttcttcagtgtcggtccagataatatggggcgccatttatggcgccttttaaaaccgaaatttctgtggaaaatgctaaggtcgaatgccgcttcattatatggactggatattctattagccggtacggcgtggccgggtaaaaaaattgccaaaaatttaggctatttgatgaaacaaacccaagatgcggggcatgaagtcggattacactcatgggatcatcaaggttggcaagctaaagtaggccgttggtcaacagaagaattaatgcaacaggttcgtttaggtgtagaagcactggaaaaagcacttgaaaaacctgtaaaatgttctgcggttgctgggtggcgtgctgatgaacgtgttctaatggttaaagaagctttccaatttgactacaatagtgattgtcggggaacgcatccatttaggccagttctagaaaatggttctatcggtacagtgcaaattccagtaacattaccaacttatgatgaagtggtcggtactaaggtaaaggacgaagattttaatcaatttattattgatgaaatcaaaaaagatcagggtatacctgtttatactattcataccgaagttgagggaatgtcaaaagcggctcaatttgagcagttattggcaatgattgcaaacgaaggcatcgaattctgtccattaagccatctactaccacaagatatagacatgcttccgatgggtaaagttgtccgatctgactttccaggtcgagaaggctggttagggtgccaacaagaggtctaacaaaactatgttgaataaccgggcgagtaaaatcggggccatcctcttggctcttttttttgttcttacctacttatttccattgaacagccggttattatggcaacctgatgaaacacgttatgcggaaattagccgtgaaatggtggtgagcgggaactggattgttccccatatgcttgatatccgctattttgaaaaaccaatagcaggttactggattaataatattagccagttaatatttggccacaccaattttgccgtacgctttggttcagttatttctattctattaagtgcgttacttatttatttattagcacgaatgatgtggcgtaatcgccaagtcgcttttgtggctagcttaatttatttatccatgtttttggtgtttagcgtcggaacttatagcgtacttgatccgatgttagcgctttgggttactgcaagtatggtgtgttgtttttgggcgttgaaagcaaccacggcaaaaacgcgtatactggcatggataacgctaggtttagcttgtggtatggcctttatgaccaaaggctttttggcattagctatccctgttattgtgatgatccctgtaaccctttaccaaaaacagttcactcggatgttactctatggtgtgcttgctgttttaagtgcggcgttaattagcttgccatgggttttagcggtggcgaaggctgagcctgattattggcattatttcttttgggttgagcatatccagcgtttttctggtgatgatgctcagcatagttctcctttctggtattacatccctataattttactgggtgttattccttggcttggattattaccaggggcactaactagtgcatggaagaagcgccgtaagcgtcctgaactctttttcttactatgttggtttgtagtacctttcctattttttagtatcgcgaaaggtaaattacctacttacatgttgccatttatgggaccattggcgatgttaatggccaaatacggtgtagactgtgctagaaaatttaaaatgaaagcactgcgcattaatggctatattaatatttttattggtgtcgctgctgttgttgcaatattaattattcaattggtttcttctaaacctatctatatgccttatgaatggtcaaaatgggtattagcgatagtcgctttctcattatggggcatcattggttatctctgctctacattaaatggtaaacattggctatgggcagcctcttgctctttaggggtaagcttatgtattgggcaagccattcccaatagctctattgatggcaaattaccacaagagtttattcgccaaaatatcgataccctcaatgcgagcaaatatatagtcagtaacagcgttggtgtgggggctggattagcttgggaattgcaacgtagcgatatctacctttatgagagaacaggggaattaacctatggaattgaatatccagattctcaacatagattactaaaacctgaaagttttgagcaatggttagaaaatgccagaaaagaaggtaatgtctctgtggtgatcacttataaagatccgaagaaactggcgcagatgccacgacctgaagagttagtgacgaatcgtcgtatggctattttgacctatgagaaacgtaagtaatggccttttttttgttacttattgttagtttgctaacctgtattggccaagtttgtcagaaacaagcagtggtgagttggcaaaataattcaaccactaaagccagaaagacgattttctggcttattactgccatcgctatgctaggctttggcatgttattttggttacgtttactgcaaatcctcccacttagtattgcttatccgatgttgagtattaactttattgtcgtcactttgataggccaatttatctataaagagacggttaatgtgaaacattgggttggtattgcctcgattatgttaggtattgtgttaatgagtatgcagtcatgaaaaccggttacttatgggccatcgccagcgcattattagtcacagttgcacaactgctgttaaaaataggtatgtcagaattacctgatctgcaattagaaaaacagtggtttgatcttcattggttatgggcaaacataatacctatcagcgttgttttcgtgggactgattggctacgtactgtcaatggtttgttggttattgactttacgtacaatccccctaaacaaagcttatccactcatcagccttagctatgtctttgtttatattctcgcggtggttttaccttggtttcaagaaacactgtcgtggtctaaaacaataggtatcatttttattatgctaggtgtttggttaataagccaaaaaacggagcaaacaacatcgcattagcttaacttagagagtgttattttctctttaaagtgagctattgtgcgattgacactatcaatgcttgtgtattcaccttcaatcacttgtttttacgtaaaaaagcagatagattttaaatctattgtcaataattgggtggatgcaatgagaaagcctactttttattctttcttactctgtattattctgctagctggatgctcatcgagtccctctaagcgtctcccacccgcgcccccgttaaaaacgcaactttctgatcctattatggtcattgtgcaattaaaatctcagctagagcaatggtatggtacgccttatcgctatggtggcatgagcccatcaggtattgattgctcagggtttgtgtataggacttatagtgatcgttttgatatacaactaccaagaatgactatcgatcaaactaaatatggtacacaaattagtaaaagtgatttgatgcctggtgatttagtatttttcaaaacaggaggaggggataacgggcttcatgttggtatttatgatactgacaatacctttattcatgcttctaccagtaaaggcgttattcgttcatcattagataatgcctattggaaaaaaactttctggcaggctcgtcgattgtaattttgtgccattgaaggcgctaacctactgagtgttatgctatcttatagctaacttttttcatatagggatatcttatgtcaggcaaattgcgtctacttctttctgagtcttatgatccatggtttaacctcgcggttgaagagtgcatttttaaacagatgccagctgatcaacgagtcctttttttatggcgtaatgataatactgtggtgattggtcgagcacaaaacccatggaaagagtgtaatacccgaaaaatggaagaagatggtgtgaaattggcgcgtcgctcaagtggtggcggtgcagtatttcatgatctaggtaatacctgttttacttttatggcaggcaaacccgaatataataaaaccatttcgacgcaaattattttagatgggttatcgaaagccggcatacaagcaacggcatcaggacgaaatgatttagtcgtaccattggctgatggtgaaagaaaaatttctggctcagcctataaagagacaaaagatcgtggttttcatcatggtactttattaattaatgctgatttatctcgtttagctaactatttaaatccagatccgaaaaaactacaggcgaaagggatcacctcggtgcgctctcgtgtcactaatttagtggaattaaaacccgatataactcatgaaaagttatgccacgcgattactgacagtttttttgactattatggtgagcgtgttgaagctgaaattatttcaccacaaaaattacctgatttaccgggttttgcagaaacatttgcaaaacaaagtagttgggagtggaattttggtcaagcgcctgcgttttcacatctattagataatcgctttaaatggggtggtgttgagctgcactttgatattgaacgcggtacgattattagaagccaaatttataccgacagtttagatcccgcaccattagaaaagctatcgcagatgttagttggacagcgttatgcttctggatcgatgaaaagactattagcgcaattaatagagcagtacccaaataaccaatcagagcttgaagagctgcaacagtggcttgttcatgcgctttcttaattgattattatctatttaagaaaacgactgacaataaaatggtttgatataataaacaaagcgggaaaacatgatgttttcccgctttgttttgtcagtcaatacttctggctatattagctattttcacatgacataaaacgacgtgtatctggtaactcaccatgttctctaaatttagctggtgtagtgttgaagtgttttttaaagatacgagtaaatgttgcttgggaactaaagccatacatcaaagcaatatctaaaatggacatgtctttttcttgtaaagactttgctgcttccaataagcgacgtttacgtacatattcgcctaatgtgcaacctttaaaatctttaaaaatacgttgcaaatgccacttggagtagccacttttatttgcaatcgtatcaatctttataccctcattacgttgtaactgagtttctaaccatttcagaatatcattaacgacattttcagccataaaaacctcccacaataggtggggacatagtgcccaattaaatagaatagtaacgtatgttatttgtaatctattttaagcatagaggaaataataggtaggcaaaaagtgctttttatgattgataatcattatcaaagcaataggagtaagtaataaacaatgattgatagatagtctatcaaaaagaaagtgataagttttataaaattggcgcattttattttattgaatttactctattatttaacaatcgctaaattttgttatagctgttgttttgcagactgttatattttttgataaaaaatcaattaaatcattgatgaagatgtatttcaaatacaattttattggttgaaatcgtttttttaatgattaatatttctaattaaaataagtattgatacttggttgtttaaagtgcttttatcaatatataaaggctaacataaatctgtcaaaaaacggttattgcatagggggaattgtagactggagcagaagataaaagcagatatgctaaataagctcactcgcagacaacgggagacactctgcgagtgagacgaaagattttttataataaaaaatgctctcttacaatttcacgaccaatttcaattgatgctgttgcggccggagaaggggcattacatacatgtaatgaacgtttgcctttaacaaagtgaaaatcatcgactaattttccttcgcgagttaaagcttgggcgcgtacacctgccgggcctgggtgaatatctgcttcacgtagagcaggaataagcttttgtgcattttgggcaaacagcttacgtgaataggaacgacgtaattcggccatcccttcacctaaataatttccggctattttccaaaatcctttataggttagtacttcagtgagatcttttaagtcaatatcacttttcttgtagccttcacgtttaaaggctaatacggcattagggcctacgtcacgatgcccgttatacatacgtgtaaaatggacacctaaaaatgggaaatcaggattcggcacaggataaataagatgattaactaaataatttttatttgagttgagcataaaatattcaccacgaaagggaactatcttcatgccggtatcgtagcccgccatttttgctacccgatcactaaataatccagcacaattaatcagccactttgcggtaaattgtgttgtagatgtggtgactgttaccgtttcgtccgtttcattaatcgcatttactgcttggttaaaggcaaatactccacctcgagcttgaatgatttcaacgtgtttggcggcaatttccggataattgacaataccggcatcaggaacaagcaaagcagcaataccattaacataaggctccctggcttttagctcgctctcggtcattttaattacttcaaggccattttgtattccacgttgatagatattttctaatgctggtagctctttttcatcagttgccacaatcaccttgccacaacgatcgtaatagagatgatgctgtttacaaaaattgtaagtcgtgatgttaccttgcttagcgagtcttgcctttaagcttcctggtgtatagtaaatccccgaatgaacaacattgctgttatggccactttgatgaacggcggggccagattccttatcaatcaccagtactttaagctcaggttggctttcttgtaatgcactggcaacccctaatcctactaatcctgcaccgatgataattacgtcataagtcataatactacccatataatccagtataagagttaatttttttcttgttgtaaacgctttaactttccacgtacattggctaaatgaagacgcattttgtggctagtttcatcactatcttgttgtcttattgcttcaacaatagcttcatgctctgcaataacacgctcagtttcggcaatacgtcctttattttggcttaaggaatacatcaatacgccaagataaagctcatgtaagttatcgaggatgcgcacgaaaaaaggattatgtgaagcaaccataatggcacgatgaaattgataatcttcttgatgaccaatgttgttgtttttctgcgtggctaagataaaggcctgatgtgcttgctctatcgtcagcaattcttctggtgttcgacgtaaagcggcaatggctgccgcttcatgttcaatgacctcacgcatttcaagcagtgattcaatttcttgaggacaagcaatttccatcacaataggttcgtatttactcaagatagagtggtcaataacgcgtctaccgcctccttggcgtgacgtaataatgccactcgcttctaatacccctaatgcttctctgatgggaactctgctaacgccaaaggcgtcagcgagtacattttcagacggtagtttttcaccaataggataggtcccgtcataaatattttgcttaatttgatcaagaatttgttgcgacgctttttggcgtgagatcttttttatcatctagttttctccagatacttgccctacattgaccagctgttttttagagcgcaacagatggaaagcgccagtaagtaagatcaacgccatacctaataaatcggtatatagtccgggcttaatcattaaaatagcggccgctgcaaaggcgatacgttcaaaccatgttgttttgattatccaaaaattcgcagtggcaatacttagtgcataaattcccactaatgcactaatgaccattaacccgatagagataacacttaaattatcaccttgcatcagtaatgcagggttataaaccaaaataaaaggaataataaaaccagggagtgctaaacgtaccgcatcccatgaagtttgcatcggatcggctctcgcaatacttgctgccgtatagcttgctagggcgaccggaggagtaatattggataacgcgccaaaccagaagacaaagaaatgagccgctaaaggcatcacaccggctttaattaaaataggtgacactgtaacggcaaccacgatatatagagcagttgatggtaagcccatacttaatacaatacagactaacatcacaaccagtaagatcatccataatgtattgtcagtcatagagacaatattaaatgctaaggtcgcaccgataccggtcatggtaacaacacaaataatcacaccaatggcagcacaagcgatagtcacttgtaccgagccacgagccgcttctgctaaagcatcagccactttagttaatgtcattcgtaccgttttatcaggtgttagccagctggcaacaataatggttaagataccaagaaaacccgcataaataggggttttacccattaatagcgtgccaattacaataattaaaggtaatagtaataaaccgcgtgcttttaataccgctttaacttgtggaatattctctttgctaagtccttttaaaccttgttttttcgcttcaatatcaattgccatgatcaaggccgcgtaatagagcaatgcaggaataatcgcggcaataacaatcgtggtataagaaattcccaaaaagcccgccataataaaagcagccgcacccataatcggtggcatgatcattccacccgtagatgcagtagcttcaacggcacccgcaaaacgtgatgttaagccaatatttttcattaatggaatggtaaaggttcccgtagtggctacgttggcgaccgcgctaccacttaatgaacctgttaatgctgatgaaatgacggcaacttgagcaggccccccacggcgacggccggccatagctagcgctaaatcattaaatagtgctgtggcaccactaacacttaaaaacgaaccgaataaaataaataccacgatagcggtagaggcagtagagagtgtaataccaaaaataccttcactggtcataaataaacgatataacagtctctctacagaaaatcctgcatgaccaaaaatacccataaaatattggccaaatagggcatagataatggcgaatgtggctaggctaggaataaaatagcccgttgttcttcttgctgcttcaaaaagaacaataatgccaagaattgccatcgcataatccattgtgttgggaatactttttcttaccacatggagatcaacatagttaaagaaaaaatagccatagctgattaatgttaaagcgataaaaagataatcccagccattaaatttcgcggtagaaaatcgtttagagaatggaaataaaataaaaccaaggatcaaaataccactaagaaaaatagtattacgataaaactcttgggtgttggataaggcattagagtaaatagcatacaacgaaatgaatatcgccagcgtggtggtgatttttaaatagataccggtaaggtgacgagtgcctgagctagcttctttatctaatgctggtggctctaccggagttaggtggtcattattagtcataactcactcctgttatttattattagtttgcgtttgagcttcaggtggaattaaatagtcagggatatctaatccaatttctttgtaataacgataagctccaaggtgtaatggcacagaaacaccttttaacgcattttcggtggtgatgtattttgcagcactatgtacttgatgaacttctggtaagttttcaaacatggttttagtcaattcataaactaactggtcatcaatacttgtggttgtcattaagatattaggttgtgcaatggtgtttactttttctgcttggcgagggtaggtatttgctggtatttcaaagcgaaaccaagagttagcaatatgattaatatcatcaagttgcttatcagtcacttcaagtaatttggcattaacaccactggcatacatatcggtaaccgcagaggcgggaacaccagcaggtaatgctcccccatcaaggcgtccatcacgcattgctgaaacggtatctccataaccaagatattcaggagtgatctcttttttagttaaattcacacctttaagaatgataatggtcgattgttcagtgccactggcttgtggcccgacagagaagctggtggcacgaatatcatccaatgttcctgtttttactttgtcattcattaagacaaagtgctctacatttggccaaagcattgatatagaacgtagatttttttctggtttgccttcaaaattacgtacaccttcgtaagcttccacagctaatagactttgtagaatagaaagctgagcttcgttttgttgcattaaatagatattttcaattgagccagcagaggactgccctgtgacttgtattcctctatccttgaggtgggtgctccaaacattggctaaaccgactcccatcgggtaataagttcctcctgttgaggccgttgctacagagagaaattgcttattggcattctcttttttgccgatcattgctagtgatacaacagcaataacagcaacaataccgatggcaagctttgtttttcttattctcatgatgttgttcctgtacataaaaacgcaggtgaatatttcacatcaacttgtatacaacatgacaacttttataggtaaaggaaggttacgaaattgtgaactgtgttgattaatttgatacgtgaatgtaacaaattgtgatcatgatggtaattatgtaaattatatccataatcaaggggtttttatcaagaaggcagagaaaatatcgataacttggggtatttgaaaaataattcactaaaaaataaattaataatagattttctaaaataaataactatttacattaaaggaataaataagagcagataggggcgagaaaacaataattaacgggtatggctaacaaataaatatcaaaattagtcaattaaagataataaataattaaaaattattattttataatgagatggagattacgccattggctattaaaataaatactcctgaccacactaaggctgaaacagtacttgttagataaataccataaatggggagttttaataaacctgcgctaaaaggcgtaaggtagcgaaacacagctaaaaagcgtgaaataaaaagaataaagaatgctttattttttaacagttgttgtatacgtaagatctttgtttgatagcgggtaacccatttatttaagcgagggaaataataaatggaacgccctaactgataactcactatagatcctaataaggcacctaaactagttgctaaccaaagtaaaataggcgaatggaagggcaagcaaaccccaaatattaagatcagcattaacgatgcgggaggtaaaaaggatgaaataccaatagtagattttcccgcagtgagcagggtaatagtaaaaaataaagcgataggagaaacatgacttaatgtgtcaagcattgaatggagtatctccattttattctcctttgataatattttgcccctttagtatagagtgcatctttataccagactgtccgttagcctagcaaaatttaatggtcagaaaaagtaagtcaagagcttgtaaataaaatgcccctccattctaatgactaatccgttaactggaggggcttattactaaataattaaattataattaatgtgcttcattaatttatcgttatcacgataatcaacaggaatggctaacacagcaggaccatcaacagctatcgctttacgtaaggtttcacgaagttgagatgcgcactcaacagaaaatcctttagcaccaaaagattctgcatagcgtttaaaatcaataggaccaaattttacgccagaaggacggccatattttacctcttcttgcatctccaccatattataagcattatcaacccagataatatgcaatatattggtattaagacgaactgcggtttctagctccattgaagattgcataaatcccccatcaccagaaacagagataattttatcgcaaggacgtacaaaagaagcgcctattccccaaggtaatgcaactcccatggtttgttggccattagaaattagcatttgtctcgctctaaaactataaaggtaacgtgcaagccaaatatgaaaactccccatatcaatacaaagagtgacatcgttatcaatgatatcttgcatttcatgtatgatagttaaaggatgaataggtgtgccttgtctaaaataactattttgttgcaaaatttccctttgctgacgtattttctctagtattccttggctctgattagacaattgtaattttgaattaggctggtgagttaattgttgcgttaacttatccagtgttaatttaatattgcctgttaattctaaggcagggcagtaagctaaatcgatttcagcttggatctcatcaatatggataatattggcattatgactgttccataaggaaggctcatactcaatcgggctataacctaaagtgataactaaatcagcgtgtgccagtaattcatcccctggctgattattaaataagccaattcgtccggcaaagagtggaaaatggcgatgagcaatagccccggcagattgataagtacctacaataggaacaggaaaaatatcaaggaaattttgtaaggcaagagcattttccggatcgctggcttgaagccctattaatatcacagggtttttcgcttgtaataataagctgatcgcttcttgaattgcactatcactcgcggcacctaaattaggtttggatttaggtgttaataacgggctatctacctcattattgagtatatccattggaaaggttaaaaaagccgagccgggacgacctgactccgcatgacgaaaagcattggctaacgtctctgaaattgattgtgaagaatcaacttcagcacaaaacttagtgattgggttaaacattgttactgtgtccatactttgatgaaccagtttaagtctatccgtagatttaactgagcctcctaaggcaactagaggatcaccttctgatgtagctgtcgcaatgcccgttgctagattagaacaaccgggaccagaagtggctatcgccacacccgctttaccggttaaacgtcctaccgcacccgccataaaagccgcattggcttcgtgacgcacaacaatagttttaattgttgaatcaaccaaagaatcaaaaacacggtcaattttggctccggggatcccaaaaacttgtttaacaccatgttgttctaattgcttaaccaccaagtcagcaccgcaattccaatgatgagagttcataaaaccttctttaagtttgcaagtgaatgaataaaaacagaatgacctttaggaatgattactttcagttttcggcttgttctattgcctgatgaaggtcatcgggcattaaattagcttctaagaatgttgattgatgaggtaagtcaatagtaaaacgagagataacaccgatttgtagggtgcctttttttaattgataatcaagtacatggccaccaccttcacgttggtgattaatataatgctcatgaaatccagcaacattaaggccttgagtaaattgtggggaacgaaagccggcaataatacccatttcatcgtgaaaggtaaaaataggctgattttcaatggcttctagcatgggcacataaggaggctcttgacgtggcactgtacgtgttttaactaattcaaattcgccttcaattttgatggcacaaaatagattatcggaagggacatattggttaataatattgtgaacctgttgttgagagacaggatctgaaaactgatgtgtaatatcaggtttaaagaaagtcattacagcaaaaggcgagccttgatctggacgggcttctcgcgcactgccatctgaacgtaattgaaaaacgttactatcaaaggcgaccaattcgccatcaagatgattaaaagtacctaaaccaaaatcaccatgctttaataaatcagcaatagtaacattactatcataaacaccagcaataagactactcattaaagaattttggtagatagtacattctggatgtttattaatataatgatttaaagaagttattatttcttgggtgcagttgcaggaactatgagtatttttatggttatgggtgatatcactattatctcgctcgatatggttaaagctagttttcataatgaagcagatccttatttatttagatagacattcatcaactatcaatttcattattagccctataggtaagattttcaaatgttttaattgatatcaaaaaagatgtgataatcatagagagtgagattaaagctattttattgttttttataaatttaattttacgtgtaactttattaaaaaaaaattaaaaaaatatcaatgttattgatgaggttgctttgtttgtttctatgggaaactataaattaatgtaattattttgagcgattatgagtaatcacaaggaaattaaagaagaatttaaagaaaatggatattaatagttttttattttcattgtgatttattagaaatatatttttagttataaataataaaattaattttcttaaaatttaaaaaaagattaattttaataattattatttaggaggaagttagagttatcaagaaggataaaagtgttacaaaatgtaacttttaattccaggtaaacagaaatgtatctatatatgtaagattgctgttgttattatgtaagttgttaattttcatttgtcattatatatcaacagattatgttgatttttttacatttatgatcggtatctccgatcgatggtctaattatgataggttttatctatcgcatttcacttaattgatcgattaaaacgtttttactaagtctaattatgacaatatagtaataaaaattttagttaagtagagggtaaagtaagaaaaaggaatgctttcacaaatgaaaaaagatgataataatagcgttagtatgtcggatttttttaataaaaaaacagggttgtttataaagtataaaaggaaagagttaggtttaacaggacaggatttagcgatcatattgaatgttagtcagcaacaaatttctcgatatgaaaatggaactacaaatattactgttaccttacttaataaaatactgatgatattggactcatcatggagtgagtttttaacatttaatgaattaactgataggtattaattctgatttaattgttgttaattaatatttaatatatggggaagtttaaatgaaaaaattattattacctttagtcatgagcagtgcattatttagtggatatacattagctaataccggtgaagttcaatttattggtgcggttacgtcggaaacgtgtgatattgatacagaaattggtggtttagttaaatcaacaatcgatttgggtaaaatgaccactgcagataccaatggtaaatatgttgaatttgaattagtccctcgtacggatgaatgcctgaaaaaaaccagtggccaagttggttggcaaagtgcaggttttactaattcaggtcttgctaatatgaaaggtactgccggtggtgtatctattcaattaacagcgattaattcaaccacacctaatcaggatgtaacttataataaccaaagtgttgattttggtaatggtaatgatccaattggtaatatgaaatttaaagcaagaatgacagcaacggcaggtcaaactgttacagagggtactgtaatttcaagcgcaacttatgcagtagcttataaataatgtttcattatttaattttataatgtctattatcaatgtagttacttttatttaattattctaataatagttattattatgctctatttagggtgcttttaatctattctatttttgtgaatataaataaagtttaatataagcattatgactggaataaagggtcattgatcctttatttcatttgaaaatattaatggataatatcaatgcgtttaaaatcaattaatgcttttgtgttatccttgttagtaagtccattttatgtttgcgcagatttaaatatggacttcttacatggaggagttcaactgcaagctgctggtgtatttgatgaaaataccaattatcctgctgggcattatattgttgaggttatttttaatcgaaaattaattagtaaaaaagaattaattatctcaccagaagataatgaaaatttatgtttaaaaaaagattggattaatgagttatcgcttccaataaaattaaatttatttgaattatattatcatcctgagcgcgattgttatgatattagccgttatcctggggctcaggttatttttgataattcgaagcaaactttaacatttagtattcctcaaattgcattagatgaatctctgcgccggcaggaatgggattatgggataacaggtattaaattaaactattcgggctatatttctaaaaccagttcttcacaagcacaaatttatggtgattttgatttatatgctaatttaggtcgttgggtcgcttatgttcgtagtagttaccaaaggaactcgggtacagaaacatcggaggcaacagtttccacagcaattaaatcaatacaaggaagttttaccgtaggtaaaacaataacctctttatcaatattacctaactttgctttttatggaatgtcactgcgctcggaaagggatatgcgcccatgggaaaaacgaggttatgcaccggttatttctggtgttgcaaactctaatgctaaaattactatatctcaaaatggatatgtattaagttcacaagttgttcccgcaggggcttatcaattaaaaaatatagcaccagtaagtaatggaaatataacagtgacagtagaagaaagtgatgggacaaaaacagttcgctattatcctgttgccacactttcttccttattacgcacagatgaaataaattacaacattgctatcggagaaaaagaaacagtaggtaaaagagaaaatagtttattttttctaggtgcatttgactacggattaactaatgttacggttcatgctgcgggaattttgcataataattataaaagtgcagcattaggaatgagtaaagattttggacgatttggtgcaatgtcatttactgctaatactgctgtaagtgtatttcaaaaacagacaccaacagcacccgaagttaggcagtctggtatcagctattcgttacaatatgcaaattcattgactgataatactaatttacagctactcgcatatcgctatactggtaaagattatgttgattttaatgaatttaattcaaatgctttatatcatcgcagtaatcgtaaagagcgttatgaaacgatattgtcccaaagttttgatggtagctttgttagcttatctgcttggatgcaaacatatagaaatagtattagtaatgaagttggcgcaaatattacttacaatacaacaattaaatctgtcgatttctcattatcagcggattatcaaaaattaaacgattatgagcatgataattatattatttctgttggaataaatattccctttagcttatatgataaaaatcatttttgggcaaattctgttagctacgataggaaaaataaagctagttttaattctggtgtttctggaagtattaatgaaaaaataaactatagtatcaatacaagtaaagatcgtgataactggtctaattctgcttattttggtattgatcatagtattattaatacgggatatgcgatttctcaaaatggccatcaaactaccagttctattaatgcttcaggaagtttattagccaccccagatacaggattattattcagtaatgtcagaagagatactgtcgcaattgcaaaaattaaaaatatagagggtataacattcaatgactcaccgccaactgacaaagaaggaaacactattgttggggtatcaccatacattgaaaataatttaaaaataaatacagaagaaattccgaataatgttgaattacttgattctgttcaaaattttactccagcagataaagctattatttatcgcgagtttaaatattcaacaattcaaaggtatatattaagaataaaaaataaaaatggtgattttatttctgctggaagtgctgttagaaataaaaatgatgaatatatagggtttgtttcaaattctggggttcttttattaaatttattagataagcctaataagctattcgttatatcacctaatggtgaaaaatgtactttaaatttggagaaagtagaatctaatgatcataaaattatggaaattgaatgtaatgaatagaatagtatttgtttttgctttaatcatatcgtcattaacctgttttaaagcatattcagcgtttacgcttaatggtactcgctttatttatgatgaaggtcgcaagaatatcgcgatagaagttaagaataatagtgataaaacctatggtggccaagtttggattgataatcttaatgggaatgaagtgttctttattcctgcacctaatttattcaaaataactggaggagaaaaacaattaatccgcttgctatatgtaaatgatattttacctaaagatagggaatcattgttttggctcaatattcaggaaatcccgccaatttcttctgccgatgacagtaatgtgcttgctgttgcattaaacacacaagttaaactgatttatcgccctaagattttagctgaaaaacgcgaggatgcagaaaaaagtctgacatatagtggttcagttttaaagaatcctacaccttactattttgcattaactcaagtgtcagtcaataataatcctttggtcttgtcaaaagacattgagcaatctattagtttatttccacctttcagtgaggtaaatgtgcagcgcccattgttaggtaaagtaaccgttgaagctattgatgattatggtgctagacgtgttattgagcttaattaaggaagtaaaaatgaaaaataaatcattttatttcacgctattattattttttattgctatggatacttctgctgctcgatgtcggaatgtgtcaatcaaatataattttccagcccaaatagatattacaaataaaaaagtgggagataagctttattcttttggtgcgccagacgcccctataaacgttgctggtcaatgtctacgtgctaatagtggggcgggaaatacaaatggaaattatatttatattgttgatcaatatggatcatcaccaacattatgcccgactactggtacagttgataaaaattcaccagatggatacttgcgttttcgttcaacgggaagttgtgctaattcttcttggctactagttcttgattataaaatatctggggttggctggaccaatttaacaggtcccggtggtggtactgattcaggcgttgtttatttacaaaaaaagccacctgtaggaaaaacggttattaatcctgtctatatgttgaaacgtaattattattctcgaattggtcaaatgggcaatacgttacaaaaggaaagcgttgctcttagtgcaccaacatcgatgacgttgataaataatgcttcttgtgcagtgtctgttaatgacgtcgcatttggtgaacaaaccgctagtgacgtaaaaatgaatactattgcaggaaaaaatataaatatttcttttacgtgtaatgctgtattacctgcatacacactcagtttttctggtaaagatggtgtgaataatgccacaacagggatcattaaggttaaagataatagttctgtggggtatcaactttcttgggcagatagcacggttaaacccattaatagtgctgtagttattaataatgtggcaatagctccgaatacaaagccaaaaaccaataattttactattccgataagggtaaaacctgttgcgttatccactcagccaatccctgggccggctaatactgcattaacgattaatataaagttaaattaaatggagttaacgatggtaaaaaaatcttgttttatgtttagcgttattttatttcctatttatgttggagcaacaagtttcacctctaatgttactggtggaacagtcacttcaaatttaagtatgacagtgaaagcctcttgcagtacaacggttggtgatgtgacatttggtgaccaaagcgcgggtgatattaaaaaaggagctgtcgcagagaaggtaatatcattggctattgtatgcgatacaaaaatgactaattacacattagcatttacggcggctgatggtgttaaagatgtagcaaatggcattattaatactaaattaaattcaacggtgggttatcaacttaagtggggagattcgaccgttaaacctgtggatacagcaattactattaatggcagtacaattaccccaacaaacaagccaacgcaagaaagttttactattccaatcaaagttaaacctgttgctcttggggagactgtttctcctggtgcagcaaatacggcgttaaacattaaactaactttcaattagttgagggactatgtgcaaatctatattgcttaccagcctgttaatctttatcacaagaagttgttatggctctgagttaaatgcaacctcaatcattggcggtgctgttcaatcgcaatttagtatgaatgtaaaaatagctacatgcttacccgctactgttgacaatgttacttttggagcagttgatacagcgactattttatcgggtgaagttgaagggcactcaacactctttttggattgtacgggcacaattaagccacaaagagttacaatactttttgaacctgctaatcctcatttaaccatgggtagtgtgggttatattggttcaaaaaataccacacttggctattttgtgtcgtgggaagatgaacaaataggtgctattggtgaaggggtaccaatggggaaggaacttttttttaaaaaaacggatgcttcattgatgaaagttaaacttaaaataaaaccagttgtacttccattaggaggaaagtccgttcatttgggtaatggaaatacccatataactatcaaaataaaatatatctgatatgagtttttgtatgaataaaaaaatatatatgtattttattattacttgtttaagtaattttcctcaaccaagtttatcagatgaaatcttacctgatgctcaattaacaatttctttggatgtagttagaatcacttgtgatattaataatggaaaaggatttaataaaatagtagattttgatgttatcaacgaaagtaatttattagctggtaatcaaccagccgtaaaaacacagtttattgttgattgccaaaaaagtggttttaaacctgagcatattgatatcaaagttaagcctggtagccaaggtgcattaaataatggtattggtggtgaacttaaaaccaatttatctggtgtaggaatttatttatcatgggcagactcaagcccaataaatctatctggagtgaataaaagttttagtgcagatcttaataatcaatttgatattagtttttttgcaaaaccatatgctcaatctcaaattgttgaaaaaggttcactaaaaagtagcataattattaatgcattatataagtaatttattttaatcttattcaaaaagggaacgccatattatgtttcctttatatattacagagcaattgctgtaatattatcattggggctaagatctataattttgtccccatgaatagaaaactgtctttagtgctaggggagtgttcaccatacattgagctataagtgtgaatcccttattcttataagcgtattctttcgtgattatttacaaaaagactatgtatatccgaacaaaattgagagttttcaatgaagtcaggtaaaactaaaacataatagaaaatatcatctaactgtatatttatatcatatggtccaaaatttgattcagatttaaattcaaataatttagctattccatgtaaattaactatcttagcttctatgcaaaaatatcctttattgtcaatatcgaggttatagcaaatatcttcatgatgaagtaacatgtttttatcatttataaaaaataaagattcttcgttgttgtatgaattatattcgtatagataatttattttaaggatctcatttaaaaaaagaaaaaatactttccgttggtttgttcgtataaaatccatataattcgcctgtccattcagacataaaattctcctatatgtaaagcctgacctccgactacaattagaaaaaactaattatcaaccgaagttcagacgcttacacttaaaattattcactatatgacgtaattcatcatatctaaactcttcatagaagatttagagctttcaattattagcccactataaactagttatttcttctatagaataaaaagtaccatgcaaatgctgattataatgctctactctatcagctaatattattcgattattattggtaatcctttttctaactaattttgcagcattatacagttctattcttagtttaattaaattagatctatcaggtgaatcttcagaaagataacttccaatagttcttaataaacaacatattgtatcagactcttgtcgtgtcaaatattgtttatgtcgtaactttaggtatgcatagcaatataccttactaaaggtgttcttctgatgtagtgttttatttatagccaatgccatgattagtttatcagctaaatagcgatgttttaagtaagatctagcattcttccattcatttaaccctctatctatggataactcagtttgccgtaaatatgaatacaaggctaataaaagtttattatcatagtaaatattcattatcgacaacctttttctgttaaacgagaccaccaagattgtttttttaaacacagtattcttattatgtagagataatggctgttcagttggtatgacccctgtttttcttggcccaacgttagtttcaattatcatttccttcggaacctcaaactcaacatatgaaccacttttccaagatcctatgtctgcacctgccgttttgggatctccaaacggagcaatctcgatatgcactcctattggtgttcctcttgcagggttgattgactgtgtgttttttatcccttctaggccttcaactgaggtatggtgccttactctaaccatttcctgagatgacaacccccacggatcaatccatcccaacggattcggcgcatattgatacagattaatcccacccaataatccaattgggtcaggcataataaaacggcctatctgtgggtcgtagaatctaaaggtattaaaatgtaatcctgaatactcgtatcatcctgatactcgccctacgggccagcgcaagcgctgttcaaatttgttcccgacaaatttgtcattgtcaaaatactgtccggcatagcataagttttgctcaaaggaggccatcacacgttcagggtcagagtagaaacttaatgggctattgcgaacaaagccaaagcgtttatattttcctgaccatagcgtattgccttgtgcattggtgacttcaagtggggcgctgttaatatcgcagtggtgccagtaataatgaaaaccactggattgtttcacgataacggcaagaggggtataactgccgtgctcttcatagcaataagtttgatatttatcggtgttgatatccttctcttgcagtaaccgtagtcctagctagtttcggcatcaggtgcacattaatgttgttttgcggatttatgcaggatagtttattcttatttttaaagaacgtgtcacgtaacctaatttttttttacctattattttcttaataaaaatactactttgaattataaagcagactattcattaacattgaaaaattcaatattcaatccctcatcattacataaatcgacaaattgttgagagagaatcatttgctcacaaaaaacgctatctctcgctataaagaaatctttatcacatttataggtgggaatatcgatcaatttagtaccatcaataagttccctgaatgttgttttctcctcgtcaataatcggaaggtaattattcaccttacataaaaacatcgtttcatgcgtattttccacagtacacttatagaatgacatttcagatgcaattctaagttcaaatatagataccgctttttgcgaaaaaacaggaactccgatattagaaggaaaataatctggtgctcttagtttatctcttcgcatagtactttgtattttaccttttggttgtgaatataagagaaacttaccattcccttcattccaaatgaaaaaacttgataatcttgactttggatctgagaagtcaataactccattgcctaatgagaaactactaattgtatagatgttcatacccttatcctcgtaatcaagcacatgtaagttttcctgttttaaatcctttacgagcctcatgttgtaggttcaatatttcattttgtattcggcgataatcccatttttctttaattgcaactctttctaaagcatctagttttgatttcatcatttcatcatttcatcatttcatcatttcattatatattgcatgctcttttgtccaaccacgatgaagtcccaaatcctgattaggatctattccttttgctacaggaagtcgcatcatgtttgttgcaccattaatattcattcctgattgcacaaaaataggatgatttctgagtgaataaggaattaaatgctgacgttggtaaccttgggttgtatccatccacgaagggaagcgatctagacctagcggatccacccataccaacggattaggcgcatattgatacagattaatcccacccaataatccaattgggtcaggcataataaaacggcctatctgtgggtcgtagaatctaaaggtattaaaatgtaatcctgaatactcgtatcatcctgatactcgccctacgggccagcgcaagcgctgttcaaatttgttcccgacaaatttgtcattgtcaaaatattgtccggcatagcgtaaattttgctcaaaggaggccatcacacgttcagggtcagagtagaaacttaatgggctattgcgaacaaaaccaaagcgttcatattttcctgaccatagcgtattgccttatgcattggtgacttcaagtggggcactgttaatatcgcagtgatgccagtaataatgaaaaacactggattgcttcacgataacggcgagtggggtataactgctgtgttcttcgtagcaataggtctgacatttacccgtattgatatcctgctcttgcagcaaccgtagtccttgccacacaaaatgggtttcatgtcgtttcagtgtgccgtgagcccgtgactcaaccactttatgaatccggcgacccagtgcattgttatttcaaagtgctgatatctgtaaggcaaatattgaaaagcagggttgcccctgctggtagttatgaaaaatatgcaggtagagcatctgagttaagtttagatagctcctaataattctttaatatgataatcagaataagggattaattcggggagttttttggcttcttcttcagatattgaataagtattatcgaaaatgtccttttttttgcatgaattaccaatcccgaaagtaaaatataccccttctacattaataggggtgtagttattctgatgcccaatgatcctccagtcactattgggatatccttttctatcaaataacccgtaagtatcgattacaacgggttcgatttttctgttagatttttttatgtcgtcttcggttatggatggactagaagaaacgaaatcgaaaatctctactacatggcctgtcatgatttttgaaatgatgcgtccaaacccatatgtttcattatttaattgaaaacaaaagatatctccgggttttacatatctcagcatcgttcgtggttttttattccatccccaaaatttaaaatcactcattagcatttccctccgacttttccagaacttttagtcttactgtcataagcttctttaaaagcatcagcacgtgtatcagtccggttatggtcaaatgaattgtatttgttacctcggttagttgacgatatatcttctccgatagttcctgttctcgtaccatatttttcaatataatactgctcatagccgcgagcttgaccatagttaatattttcattaagtactttcattcctgctcccggcgttaaccgacctgtaccaacatgttcgatcgttcgtctattaatatcattagtaataccaacataataaggctcttttgcgcctgaatcgaacaagccataaacataatatccgggagcatcaacagcagttaacccccaaggatcaatccagcctaacggatttggtgcataagcatacaaattcaacccacccaataacccaattgggtcaggcatgataaaacggcctatctgtgggtcgtagaatcggaaggtattaaaatgtaatcctgaatactcgtatcatcctgatactcgccctacgggccagcgcaagcgctgttcaaatttgttcccgacaaatttgtcattgtcaaaatattgtccggcatagcgtaagttttgctcaaaggaggccatcacgcgttcagggtcagagtagaaacttaatgggctattgcgaacaaaaccaaagcgttcatatttccctgaccatagcgtattgccttgtgcattggtgacttcaagtggggcgctgttaatatcgcagtggtgccagtaataatgaaaaccactggattgtttcacgataacggcaagaggggtataactgccgtgctcttcgtagcaataagtttggtgtttaccggtattgagatcctgctcttgcagtaaccgtagcccttgccaaataaaatgcgtctcttgtcgtttaacttggccactttctcggttttcaacggttttgtgaatacgacggcccagagcatcgtagtggtattgggcttttatgccttgattatgagcgataaccagacgattatcaccatcataagcataggtttgtggtgattggttacggtaacggcgagcaataacattaccataggcatcatactgatagtgccacccttgaaattgacgtagtttatctccttgaggactcagcgctaaagtaggggagtgttcagcatccatttcggattgtgggcgttcgagtagattatccgcgcgatcgtaaaacagcatagcatcaaggttttcactactggcgactttttttaaacgttgctctgagtcatacaggtattctacccaacctcgataggtgtcttccatggcaccaagattatcttggggatcataaaaccacttacgccataaagtaataccatttaatggatgttgcttatcacgcgagctgaaagtgctaatggttcgccccagtttatcgtattgccgatattgggtgagttctccttgagttcgactgatttcacggtgtaggtcgtcacgttcaaattcagtaagtaactgagagcgactatcaacaaggtggttgatagccgtggcatgcccagagccataatagagccagttgaggctgtcaccttgaggtaacgtcagacggcttaggttattgagttcatcataattaaattcgacgatatcgtcgcctgtttgttcacgaataatgcggccaagtgcatcgtaggtaaagtggacttgattcgcttgcaaacccatttcaagaccacgttgattaggttgtttgctggcgaccaataggcggttcatactatcccattgatattgatagcgatcagttaaagtctctcgtttggcaaggttccccgccgcatcatagtcgagtaatattgtgcgtggtgcggatgtgaagactcggtcgcctaagtgagcttcttcaaccagtcgcccagcgacgttataggtgtattggagtagcgtctcatcaggacgtatttcttcgactaaccgaccttcggcatcacggttgaggagataacgcccgccattggcattttcaattgaaattaatgcaccttgtgcattgtaatggtagtggatatgccgagcgagtttatcaatttctgtggtgacgcgaccgaaggcgttgtattgccattgacatggggtattgtcattgcgttgatgatgagtaagtaatcctgcggcattccatgccagttgcacggtagaattatcgggcaatatgatgcgagtgaggtgtcccacctcatcgtactggtactcggtggcttcctgcaaggcgttggtttgagaaacaacacggccttcgtcatcataacaccaaatatgttgtttgcctgagcaatcagtatggcgcagtaattgcccacgtttgttccagagaaactcactgcgtccttgcttggcatcaatgcgtatagtggggcgcaatgtggttttaaagtcatagcggtattcggtgatctgatgaaggggagaaatttccttaatcagtcgccccaaactgtcatacgctaaacgcgactctgtgttatccggccaaaatacagtgataaggcgctcgcgttcattctgatattgccaacgcgtttggttaccattaccatccgttatgctgagtagtcggcccaatgcgtcccattcactaatatgtgtatgacccaacgcattgcgacaaccgcaaggtaatccaaactcatcccaaattagcgccgttttaatgcctgtacggtcggtataatgaataatttggtgatcatgattaagttgccaaaatgaggttgaaccatcgtgccaataagcggttcgtgtgaggttgatatcatcatattcaagacgatagctttcgccttcgctggttttgttttcaatcacttgccaaagattatcttctgaaagtgcccagcggtattcactgcgtaagccatatttatcgctatgccacgccataacaccggcatcagtccacccaaattggcgataagggtgatctgtctgttgctcaacacgtattaattgggcactttcgttgtaaaaataagcgcatagacgacggcgtatctgatgggggtttacttgatagactgcagtaagacgcgatacggtcttttcagcaagttgaaaagattgatattcacactcgatattgagatcaccacatcccgtaatatggatcagttggtggtgctcgttgtaatgaaaccgctgctcgtttcccacattatcaacgatatgacttaaacgactataacctttgtcatcaaaagggggataatgatagcgtagctcaccagcatcttgaaacgtccaactgtcatcctcatggtggatgatccagccttgagcagcttcgttaaagttacggtgtccgagtggaatgtcaggaaatggaaggatatcaccggatagattttgccaaacaaagccatcttcgcttttaattagctggctttcccaaaagaaactccaacctcgaccgagtgcaccctcatagcaatagctacttaagtaattgcgttgccaataaagtggtaattccgcctcatagctaaaatccaattcatcctcgtcattgaggattttttgtccgccaatcacttcaacagggcgggttaagatgccaatggccggaatagcgagactaagcccagtaaaaatttttccataacgacaagcaaagcgacttattttggcactacccggtaatttgttccacaacttcgctactgccccggggcctttggctgccgctgaaccaaaactcaggaaaccggcaaataacatcgtgagatcggatgcggtggtaacccaagagggaatttcaggttcaatatcttcggttgcttgtgttccaccgccaatccggacattgggggaaccttccatgatagtcgcatcacaggtggttttatcaccgacccgagaggctggaaaaccgttgatatagacactacccgagccttgagcgatttggcgttcactgttttctttatcacatttgacgttgctacgggtagacattgcggcaggcttgccgttaatacgaacatttttggagccgtcaaggatttccccacaggggcttaaggattttgaacctgtttcaacacatttatcccgaacccagtcggctaatagggtagttccgtaaccgacggcaatggaagcaccaatggcaagcacgccaataccaatgcagcttgcagcaatacccgcacccattaatacaccagaaatcatggcgccaccgatggcgatagcagctcctaatagggtaccgacaagcatcccccacatcgattttgagtgaccgataatatctccaacccttgccgcctctaacatagtgattatccccttggttgaaaactcgatagcaaggtattcatccatgtccattgtgtatcattaaaagcgtgtggcgaggacatggtaaatataagaacttgagtattagtaaggggataaacggcctgtatttgataaacttgttgttttttgttggggcgatagcgagagctgattaaatatccttggatcagatcttgccccagcatggagggtttttcttctaagagttgccactcttttaatgaacgttgtaacagtgctttttgattaagaatatactcttcaaaggataggtcttttgctttatcatctcgtgagatattgaccgcatgaccagtaggtgaaatcagaatattgatagtttgttctttgtagccatcaggtaatagcacactgccttcagaaaaaatacaacgcgattcattattcatttaaattccttttaataaccttctcattgtaaataatgccattattgagaataatacgaagtagtatgtaataagttaagatcttagttaaatcaatataacgttaaattaaaataaggaaaattcattttttcttctatcatagaaaataatttaaaaagaagggttgtgtcacaaatgagaagattaaaattatattaattaaggattgcaatgaaactatttaatgggaaattataatgattaaaatgtaataaattgtttttattgaaatatacgcattttattattttttgattatcaatatataatctattttatttttaagtaaaaactcattaaatgagtgggatgcaaatttaatgcataaattagatattaaattatattaaagttattttttataaaataaaacagcataaactttcgataagtctcgtagagtttatgctgcttttgttagtatttaaacgtgaagaaaaccgaataatactaaataataataaagctatttattacacattaaacaagaagttcatcacatcgccatcttgcacgatataatctttaccttccgcacgcattttacctgcttctttcgcaccttgttcaccaccataagtgataaagtcattatatgagatggtttgggcgcggataaaacctttttcaaagtcagtatggatcttacctgcagcttgtggggcagttgcacctacagggattgtccaagcacggacttcttttacaccagcggtaaagtaagtttgtaaatcgagtaacgcataacctgcacggataacacggtttaagcccggctcttcgatgcctaaatcttgcataaactcttcgcgctcttcatcgtctagctctgcaatatctgcttcgatagcagcacaaacaggaacaacaacagagccttcggcttcagcgattttacgtaccgtatcaagataaggattattttcgaaaccatcttcattgacgttagcaatatacatggttggtttcagggttaaaaagcttaaataacggataatcgctttttcttcatcacttaaatctaatgcacgcaacataccggctttttctaagtgcggtaaacatttctctaaaacttccatctctgctttagcaactttatcaccacctttggcttttttctgattacgatgcattgctcgttcacaggtatctaagtcagaaagcgctaattcggtattaattgtttcaatatcttcagcaggatcgactttacccgccacatgcacaatattgtcattttcaaaacaacgcacgacatggccgatagcttcagtttcgcggatattggtaaggaattggttacctaagccttcacctttagatgcacctttaaccaaacctgcaatatcaacaaactccattgtagtgggtaacactcgttgtggttttacaatttctgctaacttatctaagcgaggatcaggcatgggtacaacacctgtatttggctcaatagtacagaatgggaagttggctgcctcaatacctgccttagttaaggcattaaacagtgtagatttccctacgttaggcagaccgacgataccacatttaaatcccataaacgttcaccttgtcacataaaaaacaacaggaaagggggagctcctgttgtgtgctgttaaaaaaattggcgctattatagaacaaatccctgtttgattaaatcatcagggattaattgcgcaaaagaaaagggcatggcattgcccagttaacttatttgatacactaatagctttattgataggggttaagctttaaagctatgtaaacgattaatggctttttcgtaaccatcacgcatcagaatatctgtacaagcaagggcttcatcaattgcatcatcaataagtttttgctcacttgttggtggtttacctaacacaaaaccgaccactttgtttttatcaccgggatgaccaatcccaatacgtaatcgataaaaattggggttattgctaaatttactctgaatatcttttagtccgttatggccaccattaccgccacccaatttcatttttaccacacccggtggtaaatccagttcatcatgtgcaaccaatatttcatcgggttgaatacgataaaaatttgccatcgctaataccgctttaccacttaaattcataaaagtggtagggactaataaacgaacatcattaccatttaaattaatacgagcagtatagccgaagaatttgctctcttcttttagagattgttgatgacgttgagccaataaatcaacataccaagcacccgcattatggcgagtctgggcataatcagcaccggggttggctaacccgacgataagtttaattttactcacaattgcctttcactgttatcgtcttaaaagaaagcatctagtttacctttctctgtcaagaagcacaaaatagattgtcatgattattttgttgaaatctttctaggagagaatacttattatttatagggcaaaaagagcgaaacaggcgtattagcaccgataaatgatttataaaagcaataaaacacattttttgcaaagaattgtcaataattttcagagcatgtgatcactgcgacaatacctttttagtctttatggctataataactgcaatgaataaaaggttatttgatgtattttggtgttgaatcgtctgacgacgcgcttggaggtgcaacatgaaatataaacatgcttttgccgttggcaatttattgatggctatcggtatggtgcttatgctcggtagtcttggttataatcttcttagccatatttttccattaggactacctgatattttatctgatgcttcgctaatggggatctttattggtgcacttgtttggttagcaggggctcgtattggtggtagagaaaccgttgcagaaagatattggtggttgcgtaatcatgacgaacgttatcgtcgccatgataatcatcgttatccataacagtgtgggcatcaataaaatatagataaaatcataattcataatagagtaagaatagataataagtaactcattgtcgttaatatgcagataatacatatctaaagacccgctgataaagtgatagcgggttttttattgtttaaatattttatcttaaaaagataacaaaaaacccgctataacataggctatagcgggtttaattatctcaaagtacgatattaaatcgacaaattaatgttcgaacatcgcagaaattgactcttcattactgatacgacgaatggcttcagccaacataccagacaaggtcaatgagcggactttatttaatgctttgatttctgctgacaatggaattgtatcgcagacaaccacttcatcaataacagagcttctgatgttctcaacagcattaccagagaaaatagggtgagtcgcgtaagcaaatacacgtttagcaccacgttctttcagcgcttctgctgctttacataatgtaccacctgtatcgatcatatcgtcaacaaggatacagtcgcgattagcaacgtcaccgataatatgcataacttgagaaacgttagcacgagggcgacgtttatcaataattgccatatcagtatcattcagaagtttagcgatagcacgagcgcgaacaacaccgccaatatctggagaaacaacaatagggttgtccaattctttttgaagcatatcttctaaaaggatcgggctgccgaagacattgtcaaccggtacatcaaagaacccttggatttgttctgcatgtaagtcgcaggttaaaacacggtctacgcctacactagataagaaatccgcaacaactttagccgtgataggaacacgggctgaacgaacacggcgatcctgacgggcatagccgaagtaaggaataacagcagtgatacgaccagcggaagctcgacgtaatgcatcaaccatgaccactaattccattaagttatcattagttggtgcgcaggttgattgaatgataaaaacatcaccaccacgtacgttttcgttgatttgcacactgacttcaccgtcgctaaaacgacctacagcagcgtctcctaagctagtatagagtcgattggcaacacgttgagccagttccggggttgcgttaccagcaaaaagcttcatatcgggcacgagaaaaacctcaggcttgcgtccagagagagatattgttgacctgtaaagaacgtgtttatcaacatagggtttgtaaacatcatagttacgggtgcaataacacaggtatccttgagcggaataaatgcacaggggaaatgttaacgccttgcgccacaaatccgtgcacccactcaggggcgttaattaacacttcactagcggcctcttgcgattcaaactcaccgaatacacaagcacctgtcccagttaagcgtgacggtgcatattctaacagccacgaaagcagatattcaacctcacgaaaacgttttcttgcgatcatttcacagtcatttgcaaacggagcctgtaataatgcgcccagagagcgaataggcgaattacgttttaattctggatctgtgaagattgtcggggttgggatagaaattccggggtgagcaactaaataccaacactctttgggtgatgctggggttaatatttcaccaataccttcagcaaaagcggcatgccctttaacaaataccggcacatctgcgcctaacgtcacgccgagtgtggctaatgtttcatcgcttaggcctgcttgccaatggtaattaagggctatcagtgttgtcgcagcattggaagagcctccccctaaacctcctcccatgggcagttttttatcaatactaatatctgccccttgatagcgtaggggaatatggtgctgatagcagtattgacgtaataatttggctgctttaataatcagattatcttcatctgcaaccccttcaacgggggttaagatggttaactgcgtatcattacggggcgtaaaagttagcgtatcgccataatctaaaaattgaaataaggtttgtagattatggtaaccatcggggcgtttcccggtaatgtagagaaaaagatttaatttggcaggagagggccaacttagtgtcattgctgtatatcccagttatccatttttaattttatcgtgcgttcaccttgttttaattcaaggcgctgtggcaagttcggtgttattgcggtgtcataggattggtaggttaccacccaatcaccttctggggttggccatgtaaccgattttaaaagatgatttgcatcgagttcaaaatccgtggcatcacccggtaaaccaattaaccaagcgcgtaaattttttaaagggatcaccataccggtgagctgataaatcatttcagttggattgtcactataatactttttaccaccattatcagtcacttcaatcacaccaggcatcacatttaagtctagctctgtcgtccccaatggattggttaaaagtaagcgatagcgatcggtatctttatcttgccaatagaaacgtgcgtaagttttataggtgccttcaatgtaagcgaaggcgccacgtgtctcatattgtgaaatcttatttaatgcttgttgacgcgattgccattgaacatcgttatctgacgctgaaccttgtgtttgtatattatttaaattacatgcacttagtagcagcgcagctagcggaaggagacgcaaaagtgatttggttggaaaaatgcgtgagcgcatagctgagatattccttacattcgttctttgttgcaaaaaagcgtatcataaacgcgaagatataacgatatttcgttaaatagtcgattgaatttgcctatcatacaagtaagcacttttattgaaagagttcatcaagtagaatggcggcaatgaagagtccatactaaatgcgctgttttaggtttatactaagtcaagtcgcgagtcggtatttattcataactcaattataagatatgacgttattagcattaggtattaatcacaaaacagcccccgtagcgttacgtgagaaagtctctttttctcctgataccatgggtgacgccttaaataacttgttacagcaacctgctgtaagaggtggtgtagtgctgtctacttgtaaccgtactgagctttatctgagtctagaagataaagaaaatagccatgaacaactgatcagttggttatgtcagtatcaccaaattgagcctcatgagcttaaaaatagtgtttattggcatcaagataatcaagcagtgagccacctgatgcgcgttgctagtggtttagattccttggtattaggtgaaccgcaaattttagggcaagtcaaaaaagcgtttgccgattctcaaaactatcactcgctctcttcagagctggaacgcctgtttcagaaatccttttcagttgcgaaaagagtgagaacagagacccaaattggtgctaatgctgtttctgtcgcttttgctgcctgtactttagcgcgccaaatctttgagtcattatcatcattgactatcttattggtcggtgcgggtgaaacgattgaattagtggcgcgtcacttacgtgaacatcaagtcaaaaaaatcattattgctaatcgcaccaaagagcgagcgcaacgtttagcgaatgaagttgacgctgaggttatcactttatctgatattgatgagtcactttctcaagcggatattgtgatcagttcaacagcaagtccgttgcctattattggcaaaggcatggtagaaagggcgttaaagaaacgtcgtaatcaaccaatgctactcgttgatattgctgtgcctcgtgatattgaacaagatattgaaaaactgagtaacgtttatctttatagtgttgatgatttagaagctatcattcagcataaccgtgaacagcgccaagccgcagccattgaagctgaacatatcgtgcaacaagagagtggccaatttatggattggttacgtgctcaaggtgctgtcggggcgattagagaatatcgcgatagtgcagaaatgttacgtgcagaaatggcagaaaaagcgattgcattgatacaaaatggcgctgatgcagaaaaagtgatccaacagctttctcatcagttgatgaatcgccttattcatacaccaaccaaatctcttcaacaggctgccagtgatggtgatattgaacgcctgaatctcttacgtgaaagtttgggtattacccataattaactttatctaacaggatcttaatctacgaatgaagccttctattgtcgctaagttggaagctctacaagagcgttatgaagaaattcaagcacttctagcagaagctgatgttattgcctctcaggagcgttttcgtgcgctttcaaaagagtatgctcaattaacggatatcacatcttgttatcgtcaatggcgaaaagtgcaagatgatatggaagcggcagaaatgatgcttgatgatcctgaaatgaaagagatggctcaagaagagctaaaagaagcacaaagcgtcaatgaggagctagaacagcaacttcaagtgctgttattacctaaagatcctgacgatgagttcaactgtttccttgaaattcgtgccggaacgggtggtgatgaagccgcacttttcgccggtgacctattccgtatgtatagccgttatgccgaagcacgtcgttggcgtattgaagtgatgaatgcaaacgaaggcgaacatggcggttataaagagatcattgccaaagtgattggtgatggtgcttatggggtactgaaatttgaatcaggcgggcatcgtgtacaacgcgtgccggaaacagaatctcaaggacgcattcatacttctgcttgtacagttgcggtattgcctgaagtgccagaagctgaattacctgaaattagcccaagtgatttacgtattgatacttttcgctcatcaggggcgggtggtcagcacgtaaataccacggattcggccatccgtattacgcatatcccgacgggcattgtggtagagtgtcaggatgagcgttctcaacataaaaacaaagcgaaagcgatgtcagtattaggtgcgcgtattcgtgctgccgaagtacaaaaacgtcaagaagccgaagcatctgaacgccgtaacttattaggttcaggtgatcgttctgatcgtattagaacttataatttcccacaaggtcgcgtgacggatcatcgcatcaaccttactctttaccggttagatgaggtgatggaaggtaaactagatgcacttattcaacctattgtcactgaatatcaagccgatcagctatccgctttatctgagcaagattaatgaattataaacaatggctgcatcaagcagccttgcaattaattgatagtgacagcccaaagcgggacgcagaaattctattagggcacgtaacaaagcgtgctcgtacttatttgattgcttttagtgaaactgtacttttagaagatgaacaagtgcaattgtcatccctccttgctcgacgtataaagggcgagcctatcgcttatttagtaggagagagagaattttggtcactacctttaaaagtctctcctgcaacacttatccctcggcccgataccgaatgtctagttgaaaaagcattagagaaactctctgcacaagcaagtcgaattttagatttaggtacggggacaggggctattgccttagcgatagcttcggaacgttctgactgccgtgtccttggtgttgattttcaaccagaagcggtagcattagcgatagaaaatgcacaacatttggcacttagcaacgtagaatttacggaaagttgctggtttagttcactctctggttatcaatttgatatgataatcagcaatcctccttatattgatgaagaagatgagcatctttatcaaggagacgttcgctttgagccattaaccgcattggtcgcggcagatcatggttttgctgatattgagcttattattacaaatgcccgtcagtttttagctaataacggttgggtattaatagagcatggttggcaacaaggtgaaagagtacgtaatatttttattgataagggttactgctgcgtggaaactttccgtgattacggcggtaatgagcgagtgacagtaggtcgttggaatgatgatagaaaccatagctgattacgaatttaacaaagcccctttggttaagggtatgatccttatctctcaggcaattcgcccagattttccagtcacttcagttggctatcaattggcacagctggtggagcaagcagaagcggaaattccccaccaagccagtatacaagagagaattgatgcactgctgaagctattttataaacaatggcatttcagtggtgcaagtggcaaatattgtctttctgatacgttatggttagataaagtattggccactcatattggttcacctgtgtcattaggttccattttaatttatatcgcacaggcaataaatttaccgttagcgccagttatttttcctacacagttaattatcagaatagatattccgaatgaaaaaccacttttcttaaatcccattaatggtgaatatctttctcgccatactttagacgtttggctaaaaggtaatgtaggcagtacatctgagctatcagcatccgatctagaagagtcagaacacagttctattattcgcaagttattagatacactcaaagtctctttaatggaagaaaagaagatggagcaggcacttaagaccagtgaaacggtattattgtttgatccagaagatccctatgaaatacgtgatcgtgggctgatttatgctcaattagagtgtaatcatgtggcattgtctgaccttaactactttgttgaacagtgtccggaagatcccatttcagagatgattaaaattcaaattcattcaatagaacagcatcctgttgttttacattaaaatttaatcccgtactgggtatataacggtacatggcaaaataagataggaatagatatgcaacataaagtggtgagtattggtgatatcaaggtagcaaataatttaccctttgtgctctttggtggcatgaatgtattggaatcgcgcgatttagccatgcgtatttgtgagcattacgtcacggttactcaaaaattagatattccttatgtatttaaggcctcttttgataaagcaaaccgctcatctatccactcttatcgtggaccgggtcttgatgaaggaatgaaaattttccaagagctaaaagagacttttggggtaaaaattatcactgatgttcatgaaccttcacaagctcagcctgtatctgaagtcgttgatgttattcagctaccggcattcttagcgcgtcaaaccgatttggttgaggcaatggctaaaacgggtgctgtaattaacgtgaaaaagccacagtttgttagccctggtcaaatgggaaatatcgtcgagaaatttaaagaaggcggtaacgaccaagtgattttatgtgaccgtggtagtaattttggttacgataatttagtggtcgatatgctaggttttcatgtcatgatgcaagcctcagaaggggctccagtgatttttgatgttacccactcactacaatgccgtgatccattcggtgcggcttctggtggtcgtcgtggacaagtcgctgagttagctcgtgcaggtatggcagtgggtctggcagggttatttcttgaagctcatcccgatcctgatcatgcccgctgtgatggcccatcagctttaccattagctaaattagaacctttcttagctcaaattaaagcgattgactctctggtaaaaagcttccctgagttagataccagtaaataaacttgttatgcaactacacactgtagtgaatatgttcggcgctgatctccagcgccgttatcatgaaaaaatccacaaaataacccttcatggtggttttagttgtcctaatcgagatggcacattaggacgaggagggtgtacattttgcaatgtctcttcttttgctgatgagcaaacgcaatatcactctattgaagagcaaatcgcctaccaagctaagcatattacccgtgctcgccgttatttagcttattttcaagcctatactagtacctatgcagaagtagaacatctacgaaaaatgtatgaaagtgcattattacaagccaatatggttggattatgtgttgggacacgccctgattgtgtgcccgtcagtgtgttagatctactgcaaggctattgcgaacaaggttatgaagtatggttagagttaggattacaaactgcacataataagacattaaagcatattaatcgtggtcatgattttcaatgttatcaagcaaccacaaaagaagcgcgtcgccgaggtttaaaggtgtgtacgcatcttattatcggtttacctcgtgaagatcatcagttaaatatgcaaaccttagagcaggtagtagaaaccggtgttgatggactaaaattacaccctttacacatagttgaggggagtacgatagccaaagcatggaaagcagggcgtattagtgcattaacacaacaacaatatgtttatactgctggtgaaataatccgtcatactcctgcagaagttatttatcatcgtgtttgtgccagtgccagaaaacctactttattagcccctgaatggtgtgaaaatcactggttgggtatgaatgcactctatcaatacttattagaaaaaggcgtacaaggtagtgggataaataagccttttgtggctaattgtaaataattatccactcaacataaaatcacttgtcacttttttaatcatactgtacgctttgaatctgtacaaaggaggttgctatggctcaagcactagtagaaaacagtgaacgagtgtcaattcgtatcactacagaagataaatcactgctggttcgtgctgctagtttggaaaatacaaacttaacagagtttgtacttcgtaatattgtacctgtggctcggcaagttattgaaaataatgagcgtttaaaattatcagaaaaagacacattacgtgttatggaacttttagataatccaccaaagcctaatgctaaactacttgcagcggcttttgctctaccggacaatgcatgacaataccaaattgattaaatccccctttttctttattaatttcctttaaaaccatttatactgcactttcaatggcaaataaaatataaataataacttaataattaagcccttaattaaatagtgtaaattaagggcttaaagatttttataattaataattaaaaaactactgaattaattccatatcatccagcgctttttgtagcgaaggataaaaattaagtgtgccatcaattggcgttactcgtgctcttgctaatgtctttaatggctggaagggaatatcacaaacaataatatgagtatcatgttgcacatccgccacaaagtgttggaaagcatgtaatccccctgcatctaatacaggtactgcatcccactgcataataagagttttatatcctttactacgttcacgtaattcattaaaaatacgctcggcggcagcaaagaatagcggaccattaacacgcacaactaataattgtttatcatcatcagtataagttgattctgttattttcgtcatattagcaatacgacgcataaataataaagaggctaatacgatgccgatagtgatcgcaataaccatatcaaacagcacggtaagcgataaacataatactaaaacgataatatcgtcttttggtgcatgacgaataagatcgataactttacgagcttcactcatattccatgcaacaattaataacaatgcagacattgctgctaatggtaaataagagagaaaaggcgctaaaaccagtaaagttactaaaactaataaagagtgcacaatcgcagatacaggggacgttgcaccggcacgtacgtttgccgctgagcgggcaatagccgcagttgcggtgatcccaccaaagaaaggcgctacaatattaccaataccttgaccgactaactcaccattagagtgatgttttttccccgtcataccatcaagcaccacagcacagaggagtgattcaatcgcacctaacattgccattgaaaaagcggcgggtaataacgcactgaccgtgctccaatttaatgcaatagactcaccactactgggtaaattccacggtagcacaaattgtggcaggatcggcggaataccttgtcctgttgaaccatcaggcaatagatagctaaattgtgaaccaatggtggcaacatcatggccaaataaattaactatccccataacagccgtaccggcaattaatgctggtaaatgaccagggaggcgtaaattcaatttaggccaataaattaatactaagagggtggttacgcctattaatgtatctccaagatggattgtcggtagagcggcacctagagcaattactttatcaatataggtttctgggacatgcgacatttctaaaccaaagaaatctttgatctgcatggtggcgatagtgatggcaatccccgaagtaaatcctaatgtgacagaaacgggaatatattcaatgagcttaccaaaacgagctaaccccataaccactaaaataatcccagacatcaaagtggcaattaatagcccacttaaaccaaattgctgtgaaacaggataaagtatcaccacaaaggcggcagtaggccctgaaacactgtagcgagagccacctgttacagcgataataataccggcaatagctgcggtataaagaccgtattgcgggggaacaccgctaccaatagccaatgccattgccagtggtattgcgataatgccgacggtgatccctgcaataatatcttttaataaacgggcaaaagagtaaggctcttttacacatgcatcaataaatgcactaaaggggcgaacccggttaactttatgcgttttcatttaggcttaaaccaaaataagaagtcaaatgccgaataaaggcgataaaaaagagcagaaaggatatcgcttttatttgctaataataatgtgatatatcaaattattaaacactatcttaatacttagcgaaaattaaagcaattaattgaaaaacttaagcaaaagagataacgttatgtaacgtattgtatttattctgttactttcatgaaaaagaagtttgacgttattctataaattatataaagcgttttattttagaataattgtcattaaaaatagtagtgcataaaaatagctaaaaagtattttataaaataaaggaaaaaacaattctataaataaagctaattagtgtatataaaaaagagttttttattaaatagactaattaagtatctaaaatagattaatagcaacgtatataaaaacaatcacaataaatttattattacaattttagtaccggtagcaagcagaacgttgtcgctgtatagatgctgtatagattaaggacagcaagacaaaaaaacgcctagttttttaactaggcgctttcttagaagatggcggtgagagagggattcgaaccctcgatacgttgccgtatacacactttccaggcgtgctccttcagcctctcggacatctcaccgtattgtggttaaacatggcattcatgctcaatggggcgctactatagggaaaagagtgataagcgtcaacagctaaatgcgttttttccttaacttttgtgccaaccagtcaaataaaaaacaatatgaacaaggcttaagcaaataatgtgatctcttttgggatgtaacatccattttttagctaaatttcgttagctggttaacattatcaacatttttcttaacaactttttcaaacagacttgaaataaaagcataaccctcgcaccctatggtaaaaatgctggaggaaggcaaaaatgaatattattttttatcatcctttttttgatgcaaatacatggataagtggaatgaaagcacgacttcctgacgcgcatattcgtgtttgggagcatggtgatgataagcctgctgattatgcaatggtctggcttcctccctatgaaatgttagcaagccgtaaccaattaaaaggtatttttgcacttggtgcgggtgttgatgccattttaaagcaagagcaacaaaaaccaggcacattacccgctggggttccggtaatgcgcttagaagacacgggtatgggtttgcaaatgcaagagtatgccattgctaaagtgatgtattattttcgccgtatggatgattataaacgtcaacaatcacaacgcttatggaaacaactccccgcacatacttatgataattttgttattggtgttttgggtgcaggtgcattaggcgcaagtgtagcgactaagcttgctgaacttggttttaacgtgcgttgctggagtcgtagtaaaaagcaaattaatcaggtagagagtttttatggtaacgatcaactgagcgattttgttaaagagtgtcagttgttaatcaatctattaccttatacaccacaaactcatggtattttaaatttctcgctttttgaacagcttaaaccttcttcttatttaattaatttggcaaggggagcacatcttgttgatcaagatctgctagaagctatcgatcaaggttatattgctgatgcctctttagatgtatttagccaagagccattaccgggtatgcatccgttttggactcatcctcgtatctctattacaccgcatattgctgcttttactattccagatattgcaatggatacaattgttgaaaatattcaacgtattgaaaagggcgaaacaccttttggtgttgtggatatgaaaagtggctattaaataatatagatataatatatatataaatagacaataaattttattttattgtctattttttttgcctaaactttcaaaaaaagaactttttctaaattttagataatataataaaaaataggctataaaagatatctcttataatatgtcttatcgatgatacctcatctgcttgaaatgttgaggtgtttatgattgataaaataatgacatatgttaataaattaacagaggttggtgtttttaataattataaatcaacaaattatatttccgatgtgtctaatacccctgctgtatataatacaaatattaaacagtttagcttaaataatgtaaataattatgtttatcttggatcaacaaatagtccactacttaataatatgggaattacccttgatgatgatggaaccttaatgttaataaaagggaaaacatatgatttatttaccggattaattcaaaagtactttaatggaggttttaaatataaagtatttcatatcaattctcaacatggtgatgatataaaatttaaagaactatatgtcgattataatgggtttttaattgggagtaagagagatacttcaggaaataataatgaactttataaaattaaatttaaaaagattgaaggtgaatataatttaatcgatgatgccaccgataatactaatattaattttattattgaatatgaaaaatatgaaatagaaaatagtttaaaacatgatttatctaatattaataatattatagaaaaagaagaaggaaatgtattaaaaataaatagagaagggatgcctattactataactttaaaagataataaactttttacatatggcttaccaccaaagctaattgctaaacgggatgtcgtagatggtgagagtaaaaaaaatgaaataaaattgccattaaaatcaaaagataaaatattagcgataaaaccggtgttaaataaaatccaacttgtggttgataaaggtaataaaataaaaatatattactttgatcctctgcatatttttgcattaaaagattatcattatgaaatcactcgtttaactcaagagccaccgttatctttttattcaatggttggagaaaataactataaaaactatcactcaggacagccattttctactcaaaaaataggtaattttagtgctaaaaatattccctttttttcgtcggctattgataatgcaagggttcactttgatagagcaaaacaacaatatgcattaaaaaaatatggtgcaatggtaaaagatatcgcgaaaagtcttgatcctggttttagagggatgttttctactataaaagctatagttaattctgctacattaccgagaacaattaaaacagatgctttaaatggtgtaaaaaaggtgattaaacatgattataatctgcttaataaatatattaccggaattaacaatggtaaatctcaaggtgaggttgtttattctttagtagaacaattaaatgataaagagagcattacaattagccagtataatgatatccgtgcattctttggtattagtgcatttcatttatctcaaaatattggtgtgagtgcgtttcttttagctaattttgcgaaaacacatgccctaacaatttcaaaaaataagcaagatgaagttgtattctcatttgtaaataaaatggatgcagggattgctacgggcttatctgctgggattatgaacaatgaacaaaaatggagagaaggggcgtttaattatggttttgtaacaccgttaatggccactgtgatactcgattatcattatgaaaaaaaatctaatttttcatttaaaattcaaccaaaagatttagtcgaatttattaatcaaggggtatctcttacagaaagtgaacttaaggataatgcaacgctggaatttaatagaacacaaaacgcgtcattaggtgttgaacttagaagtgaagtcagttttgatgtgggagtttctgctaatgaaaatatagaattaaatttaccgagaaatgcggttggtgctaatctctctttaaaaataataaatgtcattcacaatataaataaatttattggtcatggagagaccaaagcaaaacagttggaaaaaaatgttgatgttgagtattttagcggaagttttgaattataccgagatttaaaatttacaccttcagcgacaaaagcatcgcataatattcactggtatccattgacatcattgaaaaattttgaagtcatgttagaaaaaagagttaattcactatttaaacatagaatttatgatggcaaaataaaacaagacaaaaaagaatttgaagcacataaaaataacttaaaaggactttataaaagagtgcttaaaataaataacctatttgataaataccctgttcaatacgatgttaaaagaagtataaataaacttgatcatgtttatttacagttggatgcaaataagaaattaaaaaacaaactaaatccacaattgatggagaatgatctttctctcaagagtgatgtaatagataactcaatagatctagtacacaataataacagagtacaacaattcttagctgatttaacagaaaagaaaaaaatactttcttcacagaaaaaaaataatatgaatgaaaaatttaagccatattttatttctaaatatcagctaaatagtgaggggagagtgcgttattcagtgcttgaaactcaactggaagagcttatcaatgaagtgaaaacagatgaaaatctaacagttaatgatataaaagataaattagataatttctataataatgcgaaacaagagttaaataatattgaataccagcttaattcaatagatgtgatgtctataagtgaactcgccgataaagcaaaatcatttcctcttgcttttttacgattagaaagcaaaaagtctattatgcatcatcaagttaaaggtgaaattaattttttatatgataaatatgaaaagcaattggagaaaataaccactaattattattttcattaaaccatttgtttttcttatctttatttggggtgatgtgtaacgtatatattattattcaatgtttttttggttttttacaatagatctctatggaataatatcttatatttcaatgttattttcttttttatagaatttagttctaataaattcatgtaatcgaaaggataagtttattagattgtcatttggcctaatatggtgctataagatagtttcccctgttaatcagacaatatgactaatgaatatagcaagtcttcttgaacaaattgcagataaaggttggtgtgtatgggatgatttccttacaccagaggcggttaaacaattgcgtgcttgttttggtaatgatgcacaacaagcacgtataggacgtcatgaaaacctattagcagaaaccacgatacgcagtgataaaattcgttggctagagccgcaaatgggagagccagttcaacattatcttatgcagatggaaagcattcaacgagcagttaatcgtgagttctttttagggctgtttgaatatgaagctcatttcgcttgttatgaaaaaggtgctttctataaaaaacatcttgatgcatttaaagaaaatgtcacaagacgtttaacgacagtgttatatcttaatgatgaatggacaccacaagacggtggagagctagttatctatgatctggatgataatcaattagcgacagtcgcccctcaaggtggtcgtttagtggtttttctttcagaacaatttccacatgaagtattacctactcataaagaaaggatcagtattgcagggtggtttcgagttaatggtgtcagagataattttctcgatatcgccagctaaatgatgcaataaagtgttattgtcgtaatagaaatagcatgggattaggcgcgtttcttatattaggctatatagcttaatgataagagcgcgctttttctgttattaatgactgaaaataatgtgtaattaatggaatagagtgaaaagagaataaagaaaattgttgattttctggtggttaacaggacaataaaaccaaactttatggggtaaaaatagaatgaatgaattttcgattgtctgccgtttattaggtacattatttcaacgagcaccgagtgatgctattttagcaccgatcataaccatgatagcggaagataaactaagccaattatggccattagagcaagatgagctgttcaaaacgttaaaaagtagcgtagctgatttagcggcagtagaagctgactaccaatcgctttttgctgacccaatacccgcagtatctctttatgcacatgattacggtgatataaaagagcaagatattcgtcaattcttagtcactcgaggtatgcctgtcaccggatcagcgacagatagctttggtgcgctgttacttgcggcttcttggcttgaagataatgccgcacaagatgaagtattagcacaaacacagttatttgataactatctattaccttgggcgggaacctttttaggtaaggttgaagcgcatgctaaaacaaatttttatcgtactttagcagcaattacgcgtggtgcactttctgcattacgggaagaattatcagatgaagaaaacgaaaaataaataattaaatcctataataaaaacgttgatgttttcaacggcaccctagaatagctatcttatttgggtgccgttccgcttattgcgcatgttatggctagaaaataattaatttatatcagcattaatcctatgactcatcatcatgattaatattcaatatatattataattatttatatttataaaaaccaatgcccttattacgataaaaatatttaattaaccattttgtgattaaagttggatcacaaacttacccggtttaacttcaatcccttttgctaatttaaaggcagccgcttctgcactatttttttcagggttgagcacataaacaggctgattatcaaaataagtcgcaatagtcgtatctaagtaaggttttaatgccattacaaccggctccattttttcaggagacactttatagctatcaattttcattgacttgatatatatcgccccaagctctgcttgataaaagggttggcctgataaagttaaattcacattcgcgccagttttgccaaacaaagaatcaattttaagagaagcactaccagaaaagctcacttttccaggctcagtacgaccaatttggatcgctaaatcacttaatgtgatatcggcagaaacaacaccgtcttccccaatgtgtttttgtaatcccgatttttgactcagatagtcattaattactttttcactgacatcaaattgtctgatttgatcacagccagtcactaaactagttaatacaaataaagcagtcaaaaaaatagctttcatacacactccttgatggtaaacacgctaagtgtacctgatctctatggggtaagcatggctgtttcaatttttttacgattaaattgtcgatgtagtgcgtaaagggtgataaatcctattgagcctaataaaaaccaaggtagttcaggcagttcaagttgtttgccaatatcatacatccatccccctccggtatagccaatcgcgccaccaaaagctaaccctaatcgactaaaacccatataactgcctcgagcacgaggatctgctaaagaggcacttaatgtttctcgagcaggctctgcggtaatagtgcctaggtaaaatagggtgataataagaaatatggcatgtaatgagtgggtgatccccacaggaaacatactgatactcatcaaaaataatcctgccattaagcgttgttctaggcgaaaatgtttttcactccaacgggcaataggataaagcagtgttaatgataataaagcttcaattgcatacatccattttactgcgctaggggtgccggcaatttcattaacaacgatcggaaacatcagcataacttgtaccgatagtacaaaatatcccgtaagagtaagaacatactgaacaaaacgtttatcaagaataacgcgttttagcccttcttttatcggtgttctcgtggttgatatacgataggcaggtagtaaccaagcattaaaaatagccgcaagaacgaatatgccagcgccaacccaacaaactaaatggaaatcataaaggagtaaccaactgccaattaaagccccaataacggcacccgcactatcttgcattaataataaagaataaaaccgaccccgttcataagggcgagttaattttatcacgagggcagttcttggcggatcaaataaagtgccaccgagtgcagataaaatacaagataaccaaaggatccaaggtttatccgctaaagccattaatgcaaagccaagagcacgtaatagcataccggtaataatcatcggcttagcaccaaatcggtcggcgatggcaccgccaaaaatacctaagccttgctgaacaagttgtcttaacccaagggcaaagccgacaatcacacccgcccagcctaattgctcaacaaaccgaattgatattaaagggaatacgacaaaaaatcctaaaacaaccagcatattgtcaaggaggagaaagtatttccccaaggtgcgagcttgtgttaccagtgccattattcaccataagttaaacaaatgatttaaaataaataaaagggagggcaaagacagagctttgtttatctattctgtctgttaattttattaattgatagcttattatagatgatatttttttattgatgataatgctagaaatagtaggattacttcagaataagattaatcaaaaatacaacaggactgatatgtttggttatcgtagtgggatccctaaagttcgttttgaaacgaaaagaatgatcgttcgcttagcttatgaaagagatgcagagaagttagctaattactatacactaaaccgccatttcttgatcccttgggagccagtaagagataaatcgcactatttaccttcagggtgggagcaccgcttactttatataaatgaattgcatcgccaagagagtgcttttcattttctattattgacgccaaaagaagatgaagtcattggggtcgctaattacagcaatgtcatgcgtggtgcttttaatgcctgctttttaggttattcagtcggtgagaagtggcaagggcaaggctatatgtcagaagcattgcatgaaacattacgctttatgcaacgtcaacaaggaatgcatcgtattatggcaaattatatgcctcataatttacgcagtggtaatttattggctaaacatggctttgaacgagaaggttacgctaaaaattatctgcagataaatcaagaatggcgtgatcatgtacttaccgcattaacaactcgtccttttcccaaaggataatggcgaatatacattaacatattgagttttttgactaaggtgaactattttttgatcaaaaaaacagttaagtgtattcctagcaagttgatgattgatttttcagtgtgagagacggagtatagtctctttctttttattccttaccacaacaaacactagaatgaactatgaatttacttaaatcactggctgcagtgagttcgatgacgatgttttcacgagtactgggctttattcgtgatgcgattattgcgcgtatttttggcgcaggtatggcaaccgatgctttttttgttgcttttaaactacctaatctattgcgacgcatttttgccgaaggcgcattttcacaggcatttgttcctattttagctgagtataaaagtcaacagggagaagaggcaactcgtacctttattgcttatgtatcgggaatgctgacgttgatcttagcgattgtcacagtaatagggatagttgccgcaccgtgggttatttatattacggcacccggttttgctgattcagcggataaattccaactcacaacggatctattgaaaatcacctttccctatattttattaatttcattagcatcattaacagggtctattttaaatacttggaatcgcttttctgttccagcttttgcacctacgttgttaaacgtgagtatgatcttttttgctctcgttgttgctccttattgtgatccacctattatggcgcttgcttgggctgttttagcaggaggaattttacagttggggtatcaacttccgcatctgaaaaaaatagggatgttggtattaccgcggatctcgtttaaaaatagcggagtgtggcgtgttattaaattgatgggacccgctattttaggggtttctgtcagccaaatttcgctgatcatcaatactatttttgcctcattcttggtgtctggctcagtctcttggatgtattacgccgatcgcctaatggaacttcctactggtgtgttaggggtggcattaggaacaattctattaccttcattatctaaaagttttgccagcggcaacacacaagaatatcagaaattaatggattggggattaaggctttgttttttattggctttaccttgtaccttgggtttggctttattatcaggccctttaaccatttcgttatttcaatatggtaattttaatgggcatgatgcgctaatgactcaacaagcattagtggcgtattgcattgggttaatggggttaattattataaaaatattagcaccgggcttttattctcgccaagatattaaaaccccggttaaaattgccattgcaacgcttattttgactcaattaatgaaccttgcttttgttgggagtttaaagcatgtgggactggctctttcgattggattagccgcttgttttaatgcaggaatgctattttggcaaatccgtaaacaagatatttatcaaccattagcgggttggcctatctttttattaaaacttgctattgcgttagctgtgatgagtgctgtattagtcggcatgctatgggtgatgcctgattggcaacaagggaatatgctaatgcgtattttacgtttattacttgttgttgtagctggtgccgcaagttattttgtcactttatatgctgttggatttagaccgaagcatttttctctacgcgcattataattttattgtcaaactggcgcctcactgagtgtaacaaagtggggcgttgtctatttattaccactatttaacatcacctatagttagtgtttttctcttattttagacaaaaaatattgttatctagatcacatttataccatgtaatttacgcaataaaatacatgattaaattttctagcgaatagtcgtgaaggaaaacaagagataaatatttatttttttattaattttttttctgtcaaataaataaattctccattttttgcctatattagcccatatttaaccgttaattaataagaaaaacttaacatattttaaaggtgatgggtttagacaaattgtgtactttaagtaatattttacataaagtaaaaaaatagacgctattttctagcaacttacgctttgacaaattatctttttttagataaactctcttgtgttgtttaggtttaaaaattgacacatctgttaaatatttcttactaaatgatgagatattacgaatatttcaaaatgttgagctatattttaaaacatttgaattctttgatttgagacatattattattttttcattcaggtagattaacagtgactgtaaagttatttgcttgttatcgttcagtactactgaaagcaatcatatctattttgtctgcgcttcggatagataatgcgattgctagggataagcagtgaacagtagattgtgttaataatgaaatttattttggatctgtgattggtaagtagttataactactcattttaggtctaaaacctgatagtggttttttcatttctcccgtctttgttttctgtttttccctctcttttcttattcttgaatacctttctttattttttctattaatagctctataacgcaaattattttctatctaatttattataattaactaagttatcaagcgttataaccgttgaatatgtagaataaaaactactaaataatcatttaacgagtattttatcacactaaaaaataaagtgtgttttaggagcgattatgaaaaaggccattatcctttcggtatcattagccacattatttcttgctggttgcactgcagatggaaaaatcaaaacctctcaactgacacccgttaactgtgtcggcgtatttaataaaactaatgaacaagtcagctttacggcaaaagatgttgatcagcgcttatacagcccagataagccaatagacagtgttgatggttggattgatgttaaagatgtttctggtcttctctgtgaggatgtgatcacggctaatgaagactagtgatattagcatcaaggcatggtttattgttagttaagattaacggttaatcaactcgctattaagtttctatctattaagtttctataatgaaaaaccgatggtgatttcaccatcggtttttttagataaatataatggcttaattacattctatcgacagtttcaatacctaaagtctctaagccttgctttaaggttcttgctgttaaacgtgctagcttaagacggctttggcgtacattgtcatcttcggccgatagaatagggcagttctcgtaaaaacctgagaaggactgcgctaaatcatataagtatgcacacatcacatgaggtgtaccttcacgtgcaacctgcgtgatagtctcgtcaaactgtactaaacgtagtgccagttgtttttcatgaggctgtgttaatgagataggctgggttaatgcgctttcatctatatctgcacgtttaaagatagaggcaacacgagtataggcatattgcatataaggtgcagtattaccttcaaaacttaacatcagatcccaatcgaaaatataatcggtggttctgttctttgataaatctgcgtatttaacagcaccaatgcccactacacgagcaatattatttaattcctcttcatccatatcaggatttttttcgcgaattaatgttaatgctctttcatgagcctcatcgagtaagtcagttaaacgtactgtgccacccgagcgcgttttaaatggacgcccatctttacctaacatcatgccaaacatatggtgttcgagtgacatactatcaggaatatagcctgctttacggacaatagtccatgcctgcattaaatgctgatgttgacgtgagtcgatgtaatataatacgcggtttgcatgtaattgttcatggcgatatttagcacaggcaatatccgttgttgtataaaggtaaccaccatcttttttctggataatgactcccattggttcgccttccttgtttttatattcatcaaggaaaacaacagtagcgccttcactttcaacagcaagaccttttgctttaagatcagcaacaatacccggcaacattgggttataaagactttcacccataatatcatcttcggttaaagtgacattaaggcgttgataagttagctgattttgttgcattgtgatatcgacaagcttgcgccacatagtacggcagtattcatcaccaccttgtagtctaacgacataattacgggcacgttcagcgaatacttcatcttcgtcataacattttttagcttcacgatagaactcttcgagatccgctaatgccatatctgcggcattttcattttgctttttctctaaataagcaatcagcataccgaattgcgtaccccaatcaccaaggtgattagcgcgaataacattatgacctaaaaaagagagagtacgtgcgctggcatcaccaataatggttgaacgcaagtgacccacatgcatttgctttgcaacgttaggtgatgagtagtcaatcacaatcgtttcaggagttaccttggtaatattaaggtgctcatccgctaatgcgaattcggcttgttgtgcaacccaaacgggtgataagaagatattgataaaaccagggcctgctatttcaactttatctgcaatatctgtgatatcaaggtgttccagaattttttctgcgagttgtcggggtgggatacccattttttttgccgctcccatgacaccattcgcctgatagtcaccaaattgcactttagctgactgacggacaagtggttcgctatcagcaggggcgccagcagcgctcatcgccatactgattttttctgaaagaaaagcctgaatattcaccgggttaccttaaattattgagaaaataaaacctgacgacattagccagacaggtttttataaagaatatgaatttaaccttgaatttataacatattctagctagaacatgctactatctgcgccttatctttaagggtttttctctgttttttctcttaggttacttatcatggtgcttttttccgcaattcctttcttaaataacttaacgcaagagcttcctctatttgcaaaaaatttaactctactggcgaataaactatccctcgaccttgatgcttatcaaaccgatcatatatcgttacgttgtcacgatttggcgttagcagaacagtggcgtaatggcttaagtcaatgtggcgagtgtatttcagataatatgattaatgggcgacctatttatctctttaagctagcctcacctttaacactgttaggccagcaaatatctattgttgagttaccttatccaacagataaaaaataccaatatcaaggttgggaacatattgaacaggtaataaatgttgctcctgaaaaattagttgaaaaggtgatgacattattaccccatcctttacctgaagggattagaattaaaataagtgaacctaaagctgaaaaagaacgtttacctaatccaaccgttgccataaccgatggtatcgttaccataaagtatcacccatattccttactgaaaattgtagaaagtgagtgttgaacaacatttttagaaaataaattgcttgtatcagcacaaaattctgatattggaattgaatgagtaacgatattcgacaactattattaacaattactgatagtagttgctgagaaatatcgttattttctaattgctttctgtattaaggatagagaggggtggtatggcaaaactggagatttgttgctttggtgcagaatgcgcactgatcgcagaacgttcgggggctgatagaattgagctgtgtacaagcccgtcagaagggggtgtaacaccgagttatggaatattaaaacaagtcatagatctcgttcgtatccccgttcatcctattattcgtccgcgtggtggtgatttttgttatagccaagccgattttgctgcgatgaaaaacgatatcagtatgatccgtgatatgggtttttccggtgctgtggttggtatattaaatgaagaaggtcacattgatttacctaaaatggcgattttgatggaattagcagggcctttagccattacgtttcatcgcgcttttgatatgtgtattaatccattgctagcgttagatcagctgactcaattaggtgttgctcgtattttaacctcaggtcagcaagctaatgctgaattaggcttacctctattaagaacactgaatgaaaaaacccaagggccgattatcatggcgggggcgggagttcgtttaagtaatattcagaaatttttagactcgggattacaagagatccatagctcagcgggcaaacaagcaccctcgacaatgaattatcgtaaagcgggggtcaccatgagttcagacagcgaagtggatgaatttacccattattgtgtggatgaagatgtggtgggggcaatgaaggatattatgagtatttatacaacatctgttaattaatataatcttttataaatcgaaagggagtgatagtgtttcactccctttattaaatttattgaccaatagctagattattaatagccagaccaatccaagatggaacggggcgatgttttccgtcaggttgtgttatcaaagagcaccacaaacctgcttcgttacaagatgaatcaggccttgtatcacctctcactgtgaattcatctgcctttaaagccagcgcagctgaaccaccgccatctaactccatagattgcgcaatgctaaggccataatataaatgatgcagatcattgcgacttattccctctctataactgccaccttggaaaatataaataaggctattgttatcatcagcacccattgcgagtcgggttgtctctgaatcgccagaatcaggggtaggaagcggtgttaatccgcgaacaggtaaaccggatcctgatatagcaataaagtgatatcctgataaagagagttcattagcatacagttcaatcgcaggatcagatacttttttgctatagtagatatctatcctagatgtttgatctaacacccaaaacagtgcatctaatgcgatttgttcattattgttattgataaagtaattaggccctgcaaaaaactgattgggctcgttatgagtaccatgagtgggcccttgcgcgatattatcgtaatatatccctaatggcactgagcaaagattactctgccaagtggtgttattgagttgaggacgaacatcaaaatagtttgcatttaaagccactaacggtttatctagtttgttccatgcctgttctggggtataaagctccgctgtctgtgaagtgccatcctgtgttttagcatttgtattaccttcgcagcgagctgcctcgccttgatgagtatcacctaatagatgaggaataaggtatttttctttttcatggatcctaggaataatcagtagattgccgttattggctaatgtataggttcctgagcctgcattcattggtatttcataatgaccaccaaaaacgatatgacttggttttcctgttgttaatgtttctgattttgcgttctcaatgagagaaagcattgcattataggtgatatgagattcgatataagcctcgccattacgagcattatcccctgttatctgaaatgaacctactgctttaccatgctccctaaaaataagccatatctgttttatatctacgttataatctcccgaacgcactgcgctaaactgcaatctctgcacatgttcatctatgttattaatattttctgttgatcttatttcttgtgttttccctgttaatttatgagtggcattggcgataatatcaatagttatcccatcgtatttcgcccctttaaaggatatcttgtgtagataaacatcgataaataatggtcttagatcttttctatcacaaatatcagtacttaactttaaactgaccgatttattattgatatttcgattagacatattcacttcttttcttccccagcaattccattttgctgctggcgcgggactattatcttgctttgatggcatagtggcagagaaggcaggaaatatactgcaccctataataatggctaataaataatgttttaacataaagttttctccatttagctaacaataatttgataaaaattaaaatagatcctcattaataatgaataagttaaagattaaagttagcaaatattttactgctttttatattataaaattcctcacagtggagaataatattgaaatagtgtttattgagttaagttttataattaacagactgttaaaaataaatatccaaaaaataaaataaaacaatagaaactgctaataatatttatcgttaagattaaaaataaaaagattattagtagtaaagacgctaaaattttttattgcttctagcgtctatactgttttaacctgggggctaattagtttggtatgttgctattagagtaataatgtatttgttataccacattgtttaacaaaatcttcatcgtgagagattaataataatgttccttgatattgagataataaattttccaataattgtttagagtctaaatctaaataattatctggttcatctaataataaaacggcagggggttgaggactataaattaatgctaatagtgttgcttttaattgctcaccgccactgagtgtttctaaaggaaataaagacttgttacctcgaatacgtaacatacccagttttgtgcgccactgctcaatggtcattaatggctggtattgatataacgcttcagcaacgggtaatgatttatctaataaagttaaatgttgatcaagatagcaataatttgggttgagacgatattcgccggataacggggatagcttgcccattaaacattttaataaggttgacttaccgctgccatttttaccttgtatatgccaatgttcaccaccataagcggaaaaggagtagggagtttgcttgccaaaaggtaaaacaagctctgtggcaaatacatttaaccgatggccatcgccttgatagtttaatattaatttttgctgatgaatatgagttaactcttgttctaactgttgtttttgtgactgcatatcatccataacgcgctgatgtcgtttagctattgatgactgttttttctcagctcgattggtttgcatatcaagaagtaacagtgattgagagccgctgtttcttatcttttcaccttgtttacgtcgctgtaatgctttttgtaatgttacatgttgttggcgtttttcctgttttatttgactattgatacgctcatttgcagcttcgattgaggctatttgcgcatttttttgtgtttcataaagcgaataattaccgccatattcttgtaagcctttttcactcagttcaaatatattttcagcataagataataaatgtcgattatggctaataaataatacacctgatttatgatgcattaattgttcaacgagccattgctgaccttgatgatcgagatggttatctggttcatctaataatagaaaatgatcgtcatgtaaaaaagcctgacataatgctaaacgcgtttgctcaccaccacttaagtggggaataggtgtatcaagtgaaaccggcagttgtgctgaatgaagtaaattttgccaagtcatgggcaaatgccacttatcttcaagtaactcaaaatcttctaatgaagcactgccgttatcaacccgcttaaatgcttgaaaaaaagtctctatacctaaagcatcagcaatggtattacctgttaggcgagtaagctggtcgacatgaataaaaggcatacgccacatgatatggcctgatgaaggcaatagtttttgtgctaacaattttaacagcaccgattttcctttaccgttctgaccaattaaagcatttctttggcaagtcagtgaatgagtcagcggtgggaaaagcgcttcttgattgaattcaatattaagctgagaaaattgacaggcgatcgtcataattaagcctcctaaaaaataggtggcagacagcaatgatcttaattgagtttatagagcaataaacgagtgtctgccagtaacagaaaatggataccaaaacggtattgagagaattttctggcagaatttagttcattgtagggaagtacctcttggagagaaaaaagataaaatcatgaagaattataatgacaaaaaaaccttaatcaatactcaaataaaatttattgtttatagacacggggattttatataaacagaaaataaaaccaacaggttataaaaagggtattattgataaataccctttttatagaaatgactcgtggttaattaaggtttagtcgcaattaaaattgcccgtttaggagctggatagccttcaacggttttggtgtgatcgagaggatctaagaatgcttctaatgaatcagtcaccatccaatccgttttacgttgctcttcgagtgatgtgacattttcatcaacaatgcgtacatctttaaaaccgcatttttctaaccatactttgagcattttggctgacggtataaagtacacattacgcatctgtgcataacgctcaccaggaattaaacattggaattcatcaccatcaatcacaagactctctaatactaattcaccaccagaaacgagctgatttttcaattgccaaagatgatcaagtggtgaacgacggtggtaaagaacccccattgaaaataccgtatcaaaagcatttagttctggcatttgttcaatgccgacagggattaaatgggcacgctgatcgttacctaataattttctgactgcttcaaattggcataaaaagagctgagtgggatcgataccgacaacaaaatcagccccttcaccaagcatccgccacatatgataaccactaccacaaccaacatctaaaactaatcggcctttaagaggcgaaagatggggcaatacgcgatcccatttccaatctgaacgccattcagtatcaatattgacaccataaagagaaaaagggcctttgcgccatggcattaacgcttttagaatattcgttaaaccaagttgttcaccggtacttaatgctggggttttattggcgataacaccttgctttaaattaagttcagtgggagtaatctcaggtaagttttccagcattctttcccatgaagcaaaatggccatgtaaagcatgggcgcgccattctgataattgtgccggcagcgtatcaagccaatgaaataaccgttcatcttgcgcaatatgttgataaaatgagctaaaatttatcatgattattcgcctttaatggctaacagagagccaaaattaaaacattggaaccaaacttcagcatgaggaaaacctgcttgatgtaagcgtgatttatgtgtttcaacaggatcagtgagcatcacattttctaacatactacgtttttgactaatctctaattcactgtagccattagcacgtttaaagtcgtggtgcatattaaacagtaattcaccaatttgtttatcttgaaaactgaatttttctgataacactaaaaccccaccaggatttaacccttggtaaattcgatttaataatctttggcgattatcaggggctaaaaattgtaaggtgaaattaaggacaaccatcgaggcattattaatgtcaatatcaaggatatcgccttcaataatttcaacgggtgttgctgctttataagcatcaatatgacgttgacaacgctcaaccatcgcaggtgaattatcaacaccaataattttacatcccgctacatcgatattacgacgcatggaaagggtagcagcacctaacgaacatcctaagtcataaacttggctgtgaggggtgacaaaacgacccgctaacatgcctatcatggaaataatattggagtaaccgggcactgagcgtttgatcatatcagggaacacttcagcgactttttcatcaaagcgccagtcaccaagattagcaataggtgtcgcaaataagttgtcttgtggtgctgattttgaattagacataactaaaatagacttaaagaataaaagaagcgggtattctaccagaagcgacgttgctcacaaagttgcattatttagaaataaattagaaaaacaggtaaaccttttcgataccttgccgttattagactcaacagcaaggatgtctattgtgatcatggatgatcatattttccttgtggtattaatagtagaaggaaaaaatttgtatccaaggaaggaagtaaatattagcaaggatcattaagaccattgataaataggttgctgccatgccagaacgacgccagcgtatctcgcggtgtttcaacccgtaagagtgaagaagacgaccggctattaaaatggagccacaaatatgtaccatccaaacaaaggcgccattcatttccatgataagtaataaaatcatagaaatagggatgtattccactgcattaccatggacgcgaatagcggtttgtaactcataaaaaccaccatcaccgtatgcaactcgatattgtgttctaagttttacaacatttagggacaatttaatcaataatagtgcgcccaatacgatataaagcgagctaaccatcttttctccattgccaaaactaaaaaaacggcgaatttaatgataaacctcaaagcgatttatgtcgctataaataattattattaattaattatttggggattagcaaatccttgaaaagatgtatcatataatctaggtctatactcttatcgtcgggaagaattttcgttataatgtctgccttttttttgacactactcgaaaaagactattgccaaaatttccgcagcagaaagcacaacaagctgagtaaaaggatattgtatgcgtactaattattgtgggcagttgaatagcgcccatgtgggccaaaaagtgactctttgtggttgggttaaccgccgccgtgacttaggtggacttatctttattgatatgcgagatcgtgaaggtatcgttcaggtcttttttgacccagagcagaaagaggcattttcacaggcttcagaactgcgtaatgaattttgtattcaagtcacaggaacagtacgtgctcgccctgatagccaagttaataaaaatatggcaacaggtgaaattgaactagcggcagaatcgctgtctatttttaaccgttctgaagcgctacctttagatagcaaccaaacgaatacagaagagcgtcgtttaacttatcgttatttagatttacgtcgccctgaaatgtcacaacgcctaaaaactcgtgcgaaaatcacaagttttgttcgtcgctttatggatggtgaagggttccttgatgtagaaacgccaatgctaactaaagcaacgccagaaggtgcgcgtgactatttagtaccaagtcgtgttcataaaggtaaattctacgcattacctcaatcaccacagcttttcaaacagctgttaatgatgtctggttttgatcgctattatcaaatcgtaaaatgtttccgtgatgaagatttacgtgctgatcgccaacctgaatttacccaaatcgatgttgaaacctctttcatgaccgcagaacaagtgcgtgaagtgatggagcgcatgatccacgcattgtggctagatatcctgaatgttgatttaggggcattccctgtcatgacctttgctgaggctatgcgtcgttacggctctgataaaccagacctacgtaacccaatggaactcatcgatattgctgatttagtgaaaaatgttgagtttagcgtctttgcacaagcggctaatgatgaaaaatgtcgtgttatcgcgttacgtgtaccgggtggtgcatcgttaactcgtaaaaatatcgacgaatatactcaatttgtcagtatttatggtgccaaaggcctagcgtggatgaaagtcaacgaaaaggcaaaaggtatcgaaggggtacaaagccctattgctaaattcctgactaatgatgtggttaacagcatcttagcggcaacaaatgcaacagatggcgacttaattttctttggtgcgggtcgtcaaggtaccatgagtgatgctatgggagcgttgcgcctgaaagtcggtcgtgatctggaattaactgatcttaacgcatggaaaccactgtgggttattgatttcccaatgtttgaagaagatgaagataccggcagcctaagtgcaatgcaccatccatttacttcaccaaaagatctcacaccggcagagctaaccgcacatcctgtaggcgctgtagctaatgcctatgatatggtcattaacggttatgaagttggtggtggctcagtgcgtatccatcgtaatgaaatgcaacaagcggtatttagcattttaggtattactccggatgagcaacgtgagaaattcggtttcttattagatgcgctaaaatttggtacaccaccgcatgcagggttagcatttggtttagaccgcttagtgatgttattaacaggaacagataatatccgtgatgttatcgcgttcccgaaaaccacggcagcggcttgcttaatgaccaatgcaccaagttttgcaaatgaagacgcgttaaaagagctggctattcaagtgacagaaaaagaagttagcacagataacgagtaaatgatgaaatataagcacccagtatgtgttttagttgttatctatgccaaacagactaagcgggtgcttatgctgaagcgtcgagatgatcctgatttctggcaatctgtgacagggagccttgaagagggcgaaacaccttatcaggccgcattacgagaagtgcaggaagaagtaggaattgatatcataaaagaaaatcttgagctggtggattgccatcgttcaattatttttgagatattcgcacactttcgccatcgttatgcgcctaatgtgacacattgtcaggaacattggtttatgttagcacttccctctgaacgggaaattgaactgactgagcatacgcaataccaatggttagatgcgccactggcggcaaaattaactaagtcagccagcaatcagcaagcgattgaagaatttgttatttaattattagaccacgtttggagatattttcatggcaggtcatagtaaatgggccaatactaaacaccgtaaagcagcgcaagatgcgaaacgcggtaagattttcactaaaattattcgtgaattagttacagcagcacgtttaggtggtggtgatcctgcaactaacccacgtctacgtgcggcagttgataaagcattatctaacaacatgactcgtgacacactaaaccgcgcgattgctcgcggtgcgggaaatgatgaaaacgataatatggaaaccatcatttatgaaggctacggccctggtggtactgctgttatggttgaatgtttaagtgataatcgtaaccgtactgtttccgatgttcgccatgccttcaccaaaacaggtggtaacttaggaacggacggttcggtatcttatctctttaccaaaaaaggtgttatttcttatgcaccgggtgttgatgaagatgccgtcatggaagccgcactagaagcgggtgcagaagacgttgaaacttatgatgatggtgctattgacgtttacacaacccctgaagctttcggtgaagtaaaagatgccatggatgctgcgggttttgtcgctgaatcagcggaagtttccatgatcccatcaacaaaagcagagcttgatattgataccgcaccaaaattaatgcgccttatcgatatgctagaagatagcgacgatgtgcaagaagtgtatcacaacggtgatatctctgatgaagttgcaaaacaactggaagatattctgtaattggtatcacgataacggccaatagtggtgttttacactgcgttgaatagtgcgaagagaagagcagagcaagcgtatttgctcttttctctcgccatcgaccttatccgccataggaattgttatggctattattttaggtattgaccctggctctcgtgtcacgggatatggcgtaattcgccaacaagggcgacaacttatctatttaggaagcggatgtattcgtacacaggttcctgatctaccaagccgactgaaacgcatttatgcgggagtcagtgaaatcatcactcaattttcacccgatgtattttctgttgaacaagtctttatggcaaaaaatgcagactcagcattaaaattaggccaagcaagaggtgtggcgattttagcggcagtcaataatgatcttcccgtatttgaatatgcggcacgtcaagtaaaacagagtgtggtaggaacagggggagcagataaaagccaagtacaacatatggtacgctcaatcttaaaactatccgcagcgccacaggcagatgctgcagatgcgctagcgattgcgattacacactgtcactttaatcaaaacttattgcgtgtaggtgatccgcgtcttgttttaacgcgaggcaggttaagataggctatctgttggtaaaacagattagtttttcgcaggctggatatacgtccagctttttttatgttataaatttggcgtcaatatttttgcggaggcgttagggtgataggacgtattagaggcgttattcttgaaaaacagccaccagtggtgctgatcgaagcgggtaatggggtgggttatgaaataaatatgcctatgacctgtttttatgagttacctgatattggtcaagaggcgattatctacacacaatttattgttcgtgaagatgcgcaattactatatggttttaatcaaaaacaagaacgggcattgtttcgtgaattgataaaagtcaatggtgtagggcctaagctagcactggctattttatcaggaatgtctgcacgccaatttgtcaccgcaattgaaaatgaatccatctcctcattagttaaattaccgggagtcggtaaaaaaaccgcagaacgattagtggttgaaatgaaagatcgcttcaaagggcttaatggcgatctatttgaacaaaacggcgatattgagctaccagccagtgcatcatcgaaagcgccatctgctgcagatattgaagcagaagcttccgctgccttaattgccttaggttataaaccacaagaagctgccaagatgattagtcgggtagcaacggcgggtgctgatagtgaaacacttatcaaagaagcattacgcgcagcgatttaggagtaattgattgtgattgaagcagatcgcctgatttcagcagatatacaacaacctgaagaagaaattatcgatagggctattcgtcctaagctgcttgctgaatatgtgggacaaccacaagttcgtgaacagatggaaatctttattcaggcggctaaactacgtcatgatgccttagatcacttacttatctttggtccgccggggcttggtaaaaccacgctggctaatattattgccaatgagatgggcgttaatttacgtacaacctcagggcctgtattagagaaagctggcgatcttgctgctatgctaaccaatcttgagcctcatgatgtactgtttattgatgaaattcatcgactctcgcccgttgttgaagaaatactctatccggcaatggaagattatcaacttgatattatgattggtgaagggccggcagcacgctccattaaaatcgacttaccgccatttactttagttggggcgacgacccgagcgggatcgttaacctctccattacgtgatcgttttggtattgtacaacgccttgaattctataatgtcgatgacttacagcatattgttgcacgtagtgccagctttatggggttagaaataacagcagaaggggcgcgacaaattgctatgcgttcacgaggtacaccgcgtattactaaccgcttattacgccgagtaagagactttgctcaagtcaaaggtaatggcgaaattgatgaagatatcgcgtctaaagcactcgatatgcttaatgttgatgctgccggttttgactatcttgaccgaaaactactctttgccattattgataaatttatgggtggccccgtagggcttgataatcttgcggcagctattggtgaagagcgtgaaactatcgaagatgtattagagccttatttaattcagcaaggttttattcaacgcaccccccgtggtcgggtagccacaaatcatgcttatcgtcactttaatcgcattatggaagcaccgtgatctgataaagtgctttggatatcattgggcgatggtgtttaatttcgcccaatcattcaattattttgccttcctctattctcattctcaatatatctcatctctatatttacaccttattatataaaaataattttttaatttataactatcgttaacataataacaatagaaactcagacgattaaattaaaacttcgctatctatcaatcgttatttttcctactcgtttattgaatttatttattattaacgcccataaaatgagtattggtacgtaaaaataagaccgaaatatacgcatattgagtgtgttaaataaaaatagtggcttaattagcatgatattttaattaaattgagcttaacagctaaatatattgactaatttggactgctcatggaaaaaggacagtataattcaatgtgattaatttttaatactttaaaatcaatggattatatgtgctgtttctcatttaacatttctgttacaaaatatatttttatgtacatagtgtttcttgggctgcgagcaatttgtctatttattcatcatattttatgctgataaacactttttatgactgtttttacagcatgatatagcgatatttcaaccagtttacgctaagtgacttatcctagagagatacaaaaaaaacgggctgtttacagcatattgataagattttattatcctttaccgaagtcttaccgtgcgcactggctaagatgacagacatgactaacggattgtttttaagacaatcatttaatttaatttgtcgtttttgataaaaggatattgttatgccaactccttgctatatttccattgaaggaaaaactcagggcaacatcactgcaggcgcgtttactgcagattctgtcggcaacatttatgtacaaggtcatgaagaccaaatgttggtacaagaattttctcacgtggtgacggttccgactgatccgcaatcaggccaaccttctggccaacgtgcgcataaaccgtttcgttttaccgtggcattaaataaagccgttcctctgctgtataacgcattggcttccggcgaaatgctgccaaaagttgagttaaaatggtatcgcacgtctgttgaaggtaaacaagagcacttctttaccaccacactgactgacgcgacgatcgtgaacatcgattgccaaatgcctcattgtcaagatccggctaaagccgacttcacgcaacttatcgaagtctccctctcttaccgcaaaattgactgggagcacactgttgctggaacgtctggtgcggatgactggcgtgcgcctctcgaagcgtaataccgttatgacgagtccttggggactcgtccttattttgtattgttcccttttctttatccatttttgcatggaggcagattatgcttagcaaagatccgaaatcaacgcccattgacccggcatccgttttaaaagatgaagccatcaatcaagtgaaaaatagggtgcaatccaaagtgaacgaaacgctatcgacacccacgcaaaaggtggccgggatggcctcagcagcggcctcgctcactcaatcagccagcgcatcggccaatcgcgtgacggctcatcccctgatccacggtggcggttttaccggtggacaaacgttcgctgaaaaccaagcactccaagcggcccatggggcgttacttgatgcattaggcatggacagcctcgaaagtggtttggtgttcacttgcaccattggtggattgcctgacgacacctttcaagtcaccgaatttaatcttaccgaaggattatcctcgctattttcactgtccatcagtgcggtcagtgccttaccctttatcgatttccagcgccatcttggcttagcctcatcattaacggtcaaacgcgatggggtgttgatccgcaaagtcaacggtatcttagctggggcagtacaaggcaataccgacggagtgaaaacgtggtatcacttcgatattcgccctgaaatgtgggtgatgaccctcaatcaagacagccgtatttttcaacatcaatcggtgccgaccatcttaaaaaccttattggatgaggcccatgttaaagcggattgccaattctaccgtgaagatctacaccctgaacgtctctacaccacccaaaaacgcgaatccgcatttgatttttggtgtcgactggcgtttgaagagggcattaacttctggtttgaagaagaacaactgttttacagcgatgaacatatggggatgacggcgggtattcacctcacctataacccgcaggccgacaccgatatcagcgatagcactgccatgacttggcaatatggcgaatatttgtgtgtggatgaaactatccataaagacaacaactttgttcgtccttcttatccgttgtctcatgaaaacaaaattgagcagggaggacagcacagtgtgtttgaaagttatggtcgttttcaattagacgatgaaggtcgccccctaacacaggtgcgctttgagcaattacgtaacggcagcaaagtggggcaagcgacaacaaactgttttgcgctgatgcccggcaaaatcttcaccttatctcagcatccccatctgccgatgaatgatcgctggcaagtgatcagcgtcagccatcatggtgtacagccattggcggacaatagcgggggcgaaggcacacaactgtcgaatagtgtctcctttattccgggcacgcaagagtggcgtcccccttatcgttataaaccgacggccgacggcgatgaagtggcgacggtggtgggaccgccgggggaagaaatctacgtcaatgaatatggcgccgtgaaagtgcattttcattgggatcgtcggggaagtgccgatcacagtgcttcatgctgggtgcgggttgccatgggttggagtggaaatggctatggtttttctgcggtaccgcgcatcggcacacaagtgttggtcagttacctgaatggggatattgacagaccgataattaccggttgtacctatgatggtcgtaacgcaccaccgattaagttcccagagaataagacacaaactactttccgtagccaaacccacaaaggggaaggttttaatgaattgcgttttgaagatgcgggcggtaagcaagaggtgtttcttcatgcgcagaaggatatgaatacccgtgttcttcatgatcgcactacccatgttttacacgatcatgttgaagtgatcgaaaacaatcaacagatgcaggtgaaaggcgctcgcacagaaacgatagataaagataacagcgaaacggtaggccaacataaaaaaattactgtaggcaaaacattatctatcaatgtcggtgaagtcattgaattacgttgtggagcaagtgtgctacgaatggataatggtgggcatgtcacgattaatggtcaggaatttaagtttgaagctacaggtcctgtgaaaattacgggtaaagatatcgatttaaactaagggaatagtgatatgaaagtgagtaacacaaccccatttccttatcttttataccaaaaagtaggaaaaaaggatgagctgtttaatgtgatcgcattgcgccaaacttttcggctcaagactggcgggcattactcggatttaaatgaacagcaataccctttaaacatggccgatcgttactatcatgcaccggaaaccagtagtttaatcgaagaaacggatttagtgtggacgcgtccttgcactaatatccatatactgggggttgcgcgccctaaaggcaatcagcctacggcacaatggcgagcaggtattcgcattgaaaactttagcaaaacgtggtctttgtttggccctcactattgggaataccaagaggatcgatggagcttgagtgaatcaatacctgttgatggggtttctttacgccatgagttggcttatggaggaacatggcagtctccccagcaagaacaacaacaagtaatagaaaatcctattgggatcggattttaccccgatgtcgaagcacttgataaacaaaaacgttatccagcccctcagattatggaagatattcgtaaaagaccacttgatacgttgtctattgatactcgacaaattagcgaaggtatggggcctatctcccgttggtgggcaggacgtgttgaatatgccggaacatatggaaaagagtggcaagaaaaccaattcccattttatccggatgattttgatgaacgttttttcaatagtgcgcacccgtctttacgttatccagggtatttgctgggtaatgaacctatattattggaaggtttattacctgaatcatcgcgggtcgttacagcgttacctgactatcgtgtgaaaatcatattacaagacatcgaaggtgagcttttctctttgaagccagatttagacacactgactattgacttagatcgtcgtcttatttctgtcgtgaaacgacttgttatccccgcaaaatacccgattgtggaagcattaataggcgtttgggttccagcagaaacaaaaggagcttgttgtaatggctgataaacatgttggtgacggtgaaaaccaattcaaagttgttgcaaccacccctgatgtttgtcaggtagggtgttctgctattccttttgatagttttcaaagcttagatgcacaaaagcaatatgccttgagtgttaaagcacgtggatattgtaccctgaatgttgggtcaataatcaaaggaacgcaaagtaacacgggggccggtgtattatctggaacctcattaggcggtggagattgccaaattattacaggaagcccttcggtccgtattgaaggtcaaccagctgcacaagatggttcattagtcgcaatgaacaataacaatacattagggactttaatcactaatgttgcaccccctgcggagccgattgaaagcaataaaatcccctgtaataacccgcccgtgacatcagaattgttagaatcgctgcaagagatgcaacgaaaagagcaagaaagttttattgggcgactccgtcaacaaaaacaacaagcggataaaaaaagagatgattctctaaatgatattgacaaacaattaactggatatattgataatattcgagttgatcacattaatacagattattcatggtggaacagtttatataatacttcaatggatggaataactggcctgactcgtggtggtcttggttttgttgaaagtataacaaagtcagctgtggaagcttatcattacataaatccaactgttctagttcaaaacgtggctctaaatgcgagcaaaaaaaccatcgagggacttattgaagcagaaaactggaggttggggaataactgtattgaaggtgttaaggaagacgttaaagccaaatatcgtgcattaggtaaacttattgatgaagaaaaagaaaaattagagaataaatggaaaaaaagtgatagcgataaagtcgaaatagtaacaagaggtgggcttgaaatagcgactattgccgctgcttttttaaaagtggggaaagtcgctgaaggtgctaatgctattaataaagtagcagaaggaactaaaataactgaaatatctgaaggcacttctgcggtaaataaagctactgacgtaataaaagcgacagagaccagtaatatatccaaaggaagtgaggcaatcaaaggggcagaaatctccgccacagagaaaggaagtaatgccgctaaaggtactgaggtgatccaaagtccagaaacaccgaaaataacctcatcagataatggcattaaaattgaaggaaaaacggaaagcgtatctacagaaacgccacctaataaagtcaataatagccaaacggagaacaagtcgacatccagcagcaaagagtccgatggaaacagtacttctagtgcaacctgtaaaggtgaacctgttaatgtggctactggtgattttatccaacagtggccaattattcagataccgggcttgttgccgttatctctacatcgtacatataaatccacatcaaatgcaaagggactttttggaccgaagtgggcagacgaatggtcacgctgtttacatatacttgatggaaacatcatctatcaagacagtgatggtgctaattttacatttataactcccacagaggagatccgtgcaagaaatgcccatgctccccattttttactcaccggacaacgtgatggcgatttaaccctttttgatagtacgcaacaacagtttctacattttaatcacagacaaggaaaatatcgtcgattaagtgcaatcactgatttaaatcagcatcgtattgattttatatataacgagcaaagtcagcttgtcagtgtgaagcgtcatgatggcatagcgttaatactcgaatatcaacaggataaattagttcgcatttgctctgaaagcacaacctcatctcctcgagattttgtacgttgcgaatacgatactcacggttatcttagtcaatgtcatgcctatcaacaaaaccacttatggcatcgttattctcctgagggactcatggtcgcttggggggatactgacagcacagaactgacgattgattatgatgaacaagggcgtgttgttgctacacattcaccgtctggtttttggaatgatcgctttatctatgatgattatcagcgcatgacaacctacattgacgctgagggtggattttcacgttattattataatgatgataatctggtgactcgcactatcgatccattatggcgtgaaacgtatacggaatgggaacagcggaaaaagatagcagaaatcaatgagattggtgagcgcacagagtatggttatcactataatggactgcttgcctatatctatttacctgatggtaaagccatttactatgattataatgactatggtcaacttacccatttcacatcggcctttggcgacgaatggcagctaagctatgatgaaaatggcaatttaaccatagtgacagatccgcaagggcgtcagcaggtctatgaatatagccaacatggtgaattgctcaaagccattacgcccaatggtgcgcaatggcaataccactataaccctgcacatcaactgattaaaaccaccaatccttatcaacacagcacagaatatcatagtgatgaattggggcgtttactgcactacactgatgcgttaaatcacaccacacgctatcaatacagcactgagcatgccagtaccaacggcagtctcagcaagattttattacccgatggggtcgagcaacagatagactatgacagtgaacgccgagttatcgcggtgacggatggtgaaggaaaaaccacccgttatcgttatgggccttttgatgtcttactggcaatgatacgccctgacggcagtgaaattcgctttgaatatgattcactgacacgacttaaaaaagtggtgaatgcgaacggcgaggtttatctttacgaacgggataaagcgggacaaatcattcgtgaagttgattttacggggcgtgagatttgttatcgctatgaccgactaggacgtcgcattgccactcgctatccggataaccatgaactgcgttggcgctataatgaaagtggcttagtggttgaacaaagcgaatggtttgaagatgagcaagaaagccgctgtttatcgacgactcaatatagctataacgcacgtcaacaattgataaaagcgactaatcctgactcggtggttgaatttgagtatgatgaccaaggtcgtttatgcagtgaacgtattaatggacaagagattattcatcaatggaatgaagctgataatacgctggcattgactcgttttggtgagcgggagttgcattatgcttttggggcgctgggggaattaacttcactgcaagtcaatcaacatgcaccacttcaattcagctacaatgcagtaggacaagagtatttacgccgtagtcgcgccggatttgtcaattccagtcactatacggctaccggtttactggctcatcaacgagcagggcgaggcaccgaacagtttttacaatcgatacaagcccatccccaacaaccgccattttgtacggatgtgcaccgcagttatcaatatgatcgcgcttataatgtggtgggcattgaagatgatcgctggcgacagacacgttatcactataatgccaatgaccaaatcactgagacacaatacagtccacaatggggtaatcaggacgaaaaattccagtatgataacaacctcaatatcacggagcacttgacaacgccgtcctcgtcgatggtgccttcagaagcacaaggggcgatgctacagctatttcagcaacagcaagcaggacgggtgactcgccgttacacagcgaagggatatcaagattaccattatgatgttaatgggcgattagctaaaaaaattgtccatacacgcggttttcgtcccagagaatggcgctatttatggaacacacaaaatcagctgaccgcatgctttacgcctaaaggggattgttggcactatacttatgatgcttttggtcgacgtctgagtaaaaccaaaactgtcgacagtgacttagcccatattgacccattatttccgcagattaagcctaaaatcaccacgtggcgctatttatggtcgggagaccaactgatagaagaaacgccgatatatgccgatggcactcttgctaatgcgcaacaagttcaatggctgtatcaacccggagaaataacgcccaccgcgcgttatcaacagggcaaactgcactatgtggtcaccgaccaccaaggcaccccgcgagagatattcagtgaaggcgggcaagccagttgggcaggacgattgaatacgtggggccaaatgcagttttggcgttaccgcgacggtaaagctgagaatgatcctaattataccgaatgtccttttcgctttgcggggcaatatgaagatgaagaaagtggcttgtattataatcgctttcgctattatgatagggaaacagggcagtatctttccccagatccgatagggttattgggtgggctgaatccctatggatatgtgcattgcccgacggggtgggttgatccgtttgggctggcgggtggtaaggggaataagggtgctccagtaacatctagttttataaatgatgatattattaaccattccgcaaaaggagattggaaagaagctagctctatgcctccaagagatagaaaaacctttccaaatggaagattaagtggtggaggtcatggtcaatcagctatattagaactggaagcaaggggaatcctttataatatagagcacacatatccaaatggtgttcgagtgggaaatataccgagtcacgcatcgaaagcaaaacgctcagggacagctcagtcatggtttcctgaaaactggagtgacgctgatattaaagatgcagggcaagcaatatggagatcatcgaatagtgtccgagttgatatgccttctgggggagttatggtctcaggtacgcataatggtgtatttattcgtgttgtccgcgaccctaaagggggaggctctatattccctgataacacaattcaaccatgatggacttgtactaatatgaaatatagaatgaatgaaattaaaataaaatgtgatgaaatccttctagtcaatatgtggtataatttggatgagtcatttttttggccaattatggaattaattgacctcgatgatgattcacttataaaaatatatagcactattgaagaaaaatatcttaaaattttatatcatgaaacagttattgttcctgtagttgaatcaactcaatgcgaaaaatttgttgattatattaaaagcgctagtaatagtaaatcaaatttcattgatgacattctagttaatgatcttgaatcagctttgtttattaattatgaagatcctaattcccctactaaaataaaatattttagtagggtttattcaaagttaaaaaaaatcataaaaaatgaccaagacaaaccttgggatgaaaagagggttaaagaaatattgaatcagattgtaattatctcaagtgaaaacaagtctgagtactttaattatatacaagtatattggcttagtatttattttaatcagtacagaaagtttagtagtgatatgaatagtatagagttatacaaaaaaaagttatcagatatatttccatgtgctagactttaatgatatataaaatattatataaaagtaattgcacagtattcaataattgaagaggaagtgacaatttcccttggtgaagctgtacttacatgttttatctgtgatttaaataatctaataaaattaaataatatttatttagttgagcttgaaatcgaagttttcgatgaattaagagctaagttggccacctatattttaccaaaacaaattggagtttttttcgtatatttttaatcaatttaccaaaatagttaatggtgaaaatttaacttttataactaaagattctctttttgcagggcctagtggaaagtttgctcactttgaatctacttgggaagtgatgaatgatggaactttaagattaacaacgatgatccctaaattatgattgaacaatttgataaccaaatattagatatttttggaatagagcaagatagctttgatgtggattttttgcaatggaattatacttttagtaaagaaggcatcaaattattttttgtatactctatggataaaacagtatctatttcactgtatttaaatgatatttcaattgctttttgttttggttatggattggaaacattgagtataaaagataataaaatttatggtgactttgattctaattgcggtaaaagaacgttagaactagatcctataaatattacatttaaatggatagataagctttcataagccaacaatagctgtttagtttagcatatcgctccttgtatattcaaaaccacaaggggcgatgctacagctatttcagcaacagcaagcaggacgggtgactcgccgttacacagcgaagggatatcaagattaccattatgatgttaatgggcgattagctaaaaaaattgtccatacacgcggttttcgtcccagagagtggcgctatttatggaacacacaaaatcagctaaccgcatgctttacaccgaaaggggattgttggcactatacttatgatgcttttggtcgacgtctgagtaaaaccaaaactgtcgacagtgacttagcccatattgacccattatttccgcagattaagcctaaaatcaccacgtggcgctatttatggtcgggagaccaactgatagaagaaacgccgatatatgccgatggcactcttgctaatgcgcaacaagttcaatggctgtatcaacccggagaaataacgcccaccgcgcgttatcaacagggcaaactgcactatgtggtcaccgaccaccaaggcaccccgcgagagatattctgtgaaggcggacaagccagttgggcaggaaggttgaatacgtggggccaaatgcagttttggcgttaccgcgacggtaaagcggagaatgaccctaattataccgaatgtccttttcgctttgcggggcaatatgaagatgaagaaagtggcttgtattataatcgctttcgctattatgatagggaaacaggacagtatctttccccagaccccatagggttattgggtgggctgaatccgtatgggtatgtgcattgtccgacggggtgggttgatccgtttgggctggcgtgttgtccaccaccaaaaataaaagctacacaaatcggattaagaaaccctaaacagattgatggtatgaaaaaagatatgcttgacggcacttttgatttttcacttcccaaaaatcaagttggtggctttgtagattccaatggaatttattatatgggggaagggcatcatagaatggttgcagctcaagaaatatataaagaaacaggcgatgctaaatatattaataaattaatagaaaatggttcatggacaagaacaaattcaccaccaactgatgccagagctatgccatccagaagtttctttagtaatttaagaaacaaattaggattttaagaatgagaaaaataagtatatattcaaatatgttatggaagtcattatcttatataagaaatgtgcaaacacactcttgctttagaaaagcctttgataagtcttgttatatggaggctgagctattacataatattgttatatctcttcctgaagaagaaatgactgaacatgatatattttttttaaatagtcatgcgcgattctatttggaaaatgctgacaaaagaaaatgtacaaattatttttctcataaagatgatataaaaaggctatttagtctcgttcctgagcacttgaaagaaaaacttgaatggaatggcccagaataatattttgagtaattaaatctagccggaaagatcccgagaacttccggctgacttatttttaagggttgctcagttgtgctagctcagtctcccctttagtcgttggtatatttccgcatcagctcgcgcatggtgtgtttgatggcactgagttgcgcttgctgttagtattgcagcttaattgttcgaatgctttcactatcggatatcaatactaaactctcgtttaagatgaacgtattaatggacaagagattgttcatcaatggaatgatactgataatacactggcattgacccgttttggtgaacgggagttgcattatgcttttggggcactgggggagttaacttcactgcaagtcaatcagcatgcaccacttcaatttagctacaacgcagtaggacaagagtatttacgtcgtagtcgcgccggatttgtcaattccagtcactatacggctaccggtttactggctcatcaacgagcagggcgaggcaccgaacagtttttacaatcgatacaagcccatccccaacaaccgccattttgtacggatgtgcaccgcagttatcaatatgatcgcgcttataatgtggtgggtattgaagatgatcgctggcgacagacacgttatcactataatgccaatgaccaaatcactaagacacaatacagtccacaatggggtaatcaggacgaaaaattccagtatgataacaacctcaatatcacggagcacttaacaacgccgtcctcgtcgatggtgccttcagaagcacaaggggcgatgctacagctatttcagcaacagcaagcaggacgggtgactcgccgttacacagcgaagggatatcaagattaccactatgatgttaatgggcgattagctaaaaaaattgtccatacacgcggttttcgccccagagaatggcgctatttatggaacacacaaaatcagctaaccgcatgctttacaccgaaaggggattgttggcactatacttatgatgcttttggtcgacgtttgagtaaaaccaaaaccgttgacagtgacttagcccatatagacccattatttccgcagattaagcctaaaatcaccacgtggcgctatttatggtcgggagaccaactgatagaagaaacgccgatatatgccgatggcactcttgcggcgtctcagcaaatccaatggctgtatcaacccggagagataacgcctaccgcacgttatcaacagggtaaactgcactatgtggtcaccgatcaccaaggaaccccgcgagagatattcagtgaaggcgggcaagccagttgggcaggacggctgaatacatggggccaaatgcagttttggcgttaccgcgagggcaaggcggagaatgaccctaattataccgaatgtccttttcgctttgcggggcaatatgaagatgaagaaagtggcttgtattataatcgctttcgctattatgatagggaaacagggcagtatctttccccagaccccatagggctattgggtgggctgaatccctatgggtatgtgcattgtccgacggggtgggttgatccgtttgggttggcgggtgattgttgtgatgagttactagttcttgctactaaccctagaagtaaaacagttcaagagatggctgaagatttagctaatcgaattaatagaaatacagtgacattttccacaccaacaagcatgggacatattgatttaagaggaagatctcactttgataaagtgacacaagctgatattccaacaccacatgttcaagtttcaccaattaacgttgctcctaatggaaatcgcttccctcttaaaaaactagaagcggcaaggccagccacaaaacaagatattagaacagcggaaaaactagcagaaagacaagggcttttaaaatgaatgatgaactaatttttcaattacaaaattggtataaatctaaatgtaatggtctttgggagcatgaatacggattagatatcagtacgttggataatccaggatggaaagtgcatattaatggtgaaaataagaaaaaaaaatcaaatattattattaataataatgatgatgattggttaaatataataacaagtgatatagagtttaaaggttatggaagcccacagaatttaaatactattttaaatcatgccattaaatggctaaatgatcctcaataaaacaatgatagagactgtaatttaaattgtgtattgcctacttttgatatgtatttcattgccaaaggtagactaatatccacattttactcgataaccaacgtctgcaatcgcaacttgatctcaccagttgcgtttgctgttgttagttttgttgtttaattactcggaggtctttgctgtccggtatcaataccaaacacttgtttaaaatcttcacgataaaggtgaaaactgtctcaaacctgcatcttttaaccacggactctaaggtgtatcggggcggtggcacagttttgttatcgctcctccgtgtaacagagcgtggcgctatttatggtcgggagaccaactaatagaagaaacgccgatatatgccgatggtactcttgcggcatctcagcaaatccaatggctgtatcaacccggagagataacgcccaccgcgcgttatcaacagggaaaactgcactatgtggtcaccgatcaccaaggaaccccgcgagagatattcagtgaaggcgggcaagccagttgggcaggacggttgaatacgtggggccaaatgcagttttggcgttaccgagagggtaaggcggagaatgaccctaattataccgaatgtccttttcgctttgcggggcaatatgaagatgaagaaagtggcttgtattataatcgctttcgctattatggtagggaaacagggcagtatctttctccagacccaatagggttattgggtgggctgaatccatatgggtatgtgcattgcccgacggggtggatcgacccgttaggacttgcaggtgactgctgtaatgaattaaaaattgtatatggagagctagactatctaaacagacctacaggtgtatgggccagaatagataaaagctttattaatacaggcactcatgctaacccaaatatacaacctcccggatttattacaggtcaaggttctaatcgagctagaggtcatttatttggacgtcaattaggtgggtcaggtgatgatgttagaaacttagtcacacttcaacaaaggcctgcgaacacaccatttatgagtggaatcgaaggccgaataagaaaggctgctgaacaaggtcaaattattgaaatgagttctgttccttattataaaggtgtatctagaattcccgccggtattacaatcaaagctgaaggaaccggcggattttatgaatatgttaccgtacttaaccctccaggaatgtaatatttatggatcttaaaaatttaaataacatattaccagtgccacgccatgtttatgaaacaggattaaatgccagctggccattgattgatgaaaaatattcatttcccaaggattatattgaatttacaactcaatatggcatagggaagatagataatttccttactctatttaatccattcattgataatgacaattggaacttttttaagcaaaaaaaatggattatctctgatttttctgaattaaatgaatctgaccctgattattattcgtttatcttatatcctgataataacggacttcttcctattggtatcactgagaatggtgattatgttttctgggttattacatcagataatagtgacctatgggatattgctgttattgcagctagagattcagatgtcgaatatcataaaggaaatcttgtaagttttattgaaggtatattatccaaaaaaatattaagcgcatgttttcctaagagttttccctcatcaaatataatatttgataataattattttaggtcgtgaataaagctagaagatgaagagtccccataaagttggactgttcattaagcggttttcaataactgaataactgaataactgaataactgaataactgagttctgtactctacagggctcagtcctttcaatttaaccttgattctctcatggttataataatgtatacattctttcacggtctgatctaattcattaactgatttaaattcttttccgtgaaagcactcagatttaaatatctcgaaaaagctttccattgacgtattatctaaacagtttccttttcttgacatactttgttttaagcccctttcctgtagctgctgttgataataatccatttgatactgccacccttgatctgagtgaatgagtggcttttcatttgtttttagctttgtaattgcttattttagcatcttatcaactcgcttatatgtggggcgacgttgcgtttgataggcaacgatctcaccattaaataagtccattataggagagaggtaaagctttttaccttgaacattgaattgcgttacatcactgacccacttctgattgggcttcttagttttaaactttcgctttaaaatattctttgcaattttacccacctgacctttataagaacgatatttcgttgtcctaatgcaggacttaagacctaatagcttcattaatcgttggacacacctatgattgattgttactcccctattttttagagctaaggagacagggtagtatctttccccagacccgatagggttattgggtgggctgatccgtttgggttgtgtggtacttcaaaacttaataatgcatcagttgaaaataacccccgattcttggttgatgctaaaggtcaagttttagatttagagtattttagaaatctaaaatttgatgggcagataattaatgctggaagaagcggtaataagttacctgcaataggagagcctggtacttactctaaaacaacaggcggacatgtaattgtttacggatctgatggtagacgaatggctgatatatctaaggagcgaattaaaattgtcgagtggaataaggatccaagaggacagtatcattatagaactggaagtgatacgaaatttgcagatagagaaataccagatgaaattaaaaagttattggagtgaaaatgaaaaattatccaagtatagtatctaatgatcttatagcgatatttccaactccttttccgttgaactatagcttacctaatcttgtttcgaattgtgtgggattagaagcagttttagcctatgcaggattattttgtcctgagattattgaaattgatggtgctatttatcgatgtgagaataatgatggaaaaatgacaccatatgaggggtacggtaaagataaaaaaaccttggaaaaggttaataacgttttttcattcaatgatttctttctatctacaactgaagatgctgcttgttctagtgaagtattaatgactgaattcagtgaggttctaaagtatttttggggtattagattaaaaagcctttacccaaataaaacatttgaatttattatcacggacgatggtctatatggtgaagaagggttttgcatgaccttttatgaagtcgaataataaacatttatagccagaaaatccttcaattttctggcttcttcgtttttaagagcagctcagtttaccctttagccgctgatagactcagccatcagctcgcgcctagtgtgttttattgcactcagttgcgcttgctgttgttagttttgttgtttaattactcggaggtctttgctgtccagcatcaataccaaacacttgtttaaaatcttcacgataaaggtgaaaactgtctcaaacctgcgtcttttaaccacggactctaaggtgtgtcggggcggtggtacagttttgttatcgctcctctgtatatcctccgtatgatagagaatagctctatttatggtcgggagaccaactgatagaagagacgccgatatatgccgatggcaatctttcagcatctcagcaaattcaatggctgtatcaacccggagagataacgcctaccgcgcgttatcaacagggtaaactgcactatgtggtcaccgaccaccaaggaaccccgcgagagatattcagtgaaggcggacaagccagttgggcaggacggctgaatacgtggggccaaatgcagttttggcgttaccgcgagggcaaggcggagaatgaccctaattataccgaatgtccttttcgttttgcggggcaatatgaagataaagaaagtggctttataatcgctttcgctattatgataaggagacaggacagtatctttctccagaccccatagggctattgggtgggctgaatccctatgggtatgtgcattgtccgacgggttgggttgatccgtttgggttgagtggaacgtctcaattaaatgcatttcaaaatgctaatttcgccgactcccaaaaattaactcagcatttcgaaaaacatggccatgagttcagagctacttcagaagctgaatatttaaaaattggccgagatgtaatagaaaaaggtcataaagttgagtactattacaaaccattagaacaataccgtactggctatgtaatgtacatgagaaatacgaaaagaggtgatgtacaaatggcatttgtaggtattaaccctcaaggtcagatagcaactatacacacaaaaagtggtaaagacgtttggaaattactcaatggtaataaagatgaaaaagttatcaatcttatacctagagatgctaatgggttataatacatgaaatattatgcagaagtagtttcattaaatccaaatgttgaagaagaagtaacgatttcacttggtgacattacacttacgtgttttatttgtaacctaaataatccaataaagttaaatgaaatttatttagttgagcttgaactcgaaattttcgatgaagtaagagctaagttggccactgatatattaccaaaacaaataggtgattcttttgcatacgaattaaatggttatttgctagaaaataaaattattatatctaatataattcttcaagatgatttgttatatgaaatttcattttatgaaaataaatatgtttgtatttatatagatagaattaatatttcatttttcaattaatataaggataataaaggtaatgtttattatccttttgaaattctatagtctatcggtaagctagttatatactctaccatcagttcgcaaattgagtgttttctcgtacagagttgcacttgttgttgattttgctgcttaatcgctcgaatatcttcgctgtctggtgtcaataaagcgtgacgctatttatggtcgggagaccaactgatagaaggaacgccgatatatgccgatggtactcttgcggcgtctcagcaaatccaatggctgtatcaacccggagagataacgcccaccgcgcgttatcaacagggcaaactgcattatgtggtcaccgaccaccaaggaaccccgcgagagatattcagtgaaggtgggcaagccagttgggcaggacggttgaatacgtggggccaaatgcagttttggcgttaccgcgagggcaaggcggagaatgaccctaattacaccgaatgtccttttcgctttgcggggcaatatgaagatgaagaaagtggcttgtattataatcgctttcgctattatgatagggaaacagggcagtatctttccccagaccccatagggttattgggtgggctgaatccgtatgggtatgtgcattgtccgacggggtgggttgatccgtttgggttgagtggaacatcacagcttaatcctgaaacagttgatttgtatagagctgtcggcccagatgaattaaacaatataaagcaaacaaatacttttagtaatccacccggaattgaaactaaatattttaccacttcgggtgaaagtgcttccgaatatgggaaaaaagctgttttaggctttggtgatgagccatataccattgttaaaactagtgttcctaaaaatttaatcagtgatcctaaattctatgctgaggtggatggtgggattcctgcttatgttctacctagcgaaattatcgcaggtttaaaacctaatgttttaaactattcacctttgccgagaaaataagatgaagaaagcttatgcaacaataattctctttgaaactgaattaggaggtcgtaaatctcctataatatcagatagatactatgcatgccctttgtttttcacgacacctaaagagctaactccacatggttttgattgtagaatgttagttaatgaagtaggtgttgatatatatcccggccagtctaaagataatattccaattatatttttatctccagatgaagtatttccatatttaaaaattggaactatttttgatatatgggagaatgggtatataggaaaaggtataatcacaaaaatataattcgataataagccagaagaacctttaatcttcgggcttcttcgcttttaagagtcgctcagtttaccctttagtcgctgatatacttttccatcagttcgcgaaagttttttatctcactgagttgcgcttgctgttagtattgcagcttaattgttcgaatgctttcactatcggatatcaatactaaactctcgtttaagatgaacgtattaatggacaagagattgttcatcaatggaatgaagctgataatacgctggcattgactcgttttggtgagcgggagttgcattatgcttttggggcgctgggggagttaacttcactgcaagtcaatcagcatgcaccacttcaatttagctacaacgcagtaggacaagagtatttacgccgtagtcgcgccggatttgtcaattccagtcactatacggctaccggtttactggctcatcaacgagcagggcgaggcaccgaacagtttttacaatcgatacaagcccatccccaacaaccgccattttgtacggatgtgcaccgcagttatcaatatgatcgcgcttataatgtggtgggtattgaagatgatcgctggcgacagacacgttatcactataatgccaatgaccaaatcactaagacacaatacagtccacaatggggtaatcaggacgaaaaattccagtatgataacaacctcaatatcacggagcacttaacaacgccgtcctcgtcgatggtgccttcagaagcacaaggggcgatgctacagctatttcagcaacagcaagcaggacgggtgactcgccgttacacagcgaagggatatcaagattaccattatgatgttaatgggcgattagctaaaaaaattgtccatacacgcggttttcgtcccagagagtggcgctatttatggaacacacaaaatcagctaaccgcatgctttacaccgaaaggggattgttggcactatacttatgatgcttttggtcgacgtctgagtaaaaccaaaaccgttgacagtgacttagcccatatagacccattatttccgcagattaagcctaaaatcaccacgtggcgctatttatggtcgggagaccaactgatagaagaaacgccgatatatgccgatggcactcttgcggagtctcagcaaatccaatggctgtatcaacccggagagataacgcccaccgcgcgttatcaacagggaaaactgcactatgtggtcaccgatcaccaaggaaccccgcgagagatattcagtgaaggcggacaagccagttgggcaggaaggttgaatacgtggggccaaatgcagttttggcgttaccgagagggtaaggcggagaatgaccctaattataccgaatgtccttttcgctttgcggggcaatatgaagatgaagaaagtggcttgtattataatcgctttcgctattatgataaggagacaggacagtatctttccccagaccccatagggctattgggtgggctgaatccatatgggtatgtgcattgtccgacggggtgggttgatccgtttgggttgcaagttgtaaatgcttcattatcaggaaatagtcactctacaagctcagcacaaggagctctgcttaaacaatattacagcaccgcagaaagtgctaatgatgttgtaaatatagtttaaaagcgacaggaaaattaccagataactatataacaaaagcacagacagaggctgctggatggtctagaggaaaagcgttaggaaattatattctgggaggtcaaataggaggggatatttttgctaatagcacgaagatattacctgatgtccctggaagggtatggtatgaagctgatatcggactgaataatagcatgtctagagcgaagcaatcaggtaccagacttttgtattctaatgacgggttaacttacgtaacttcaaatcattacgatactgccgaagcattaggcatttggaactgttgtaaaggaggttaataagtaatgaaagaaataacactagatgggaataaacagaaaacacctattgaagtgtatcaatttttttctgaggaatttgattttggcccgtactttgcaaataatcctgatgcgttatatgactttatggtgcctattgatgcagaagataaaccagtcattatattgtggtataatagtagtattttcaaggaaaagtatcctaaagaatttgcacagcttgtctctgtgctaaatagcataagtgaatttggaaaatttgaccaagacacttttcaatttaaaattctctaaatataaggccggaaaagtgaagtgaccccataaagttggatactttaagttaagcggcttgtaaagcctgatttcgatattcaaccagagtcaggccttttaatttaaccttgatccgtttggtattgtaatactcgatatattcctcaattttatcaatcagttcatcagcgttttgaaaatgatgcccatgatacatttctgattttaataagccgaaaaaggctaccaaaacacggtcaagctttaaatacaataaaaatagtcactgatgctaactcaaatagagtagtaactgcttttccaatttagaacaaataatataagggagataatatgagattagtatatttcgtttatcaagataaaaatgcttatgaacgacaaagtgatggtgttgagttctgcaaaattcctgagtttcataatgataaaatttatttttattgtgatgaatattccatgttttgggattctattgataaagttggaaatcctaatgattgttgtaatttctcattaaagagtagtattgtcccagctacattactagaaatatctaacaacgacctgatatcttatattgatacagtaaaagaatacgttatagaaaataacaaattaagtaaattaacatatattcatataaaataattacatcataagtgtctatgttcaaaattatgtttttacctacttttgatgtgacatttacaccgaaaataggcaattaattatctcttattcgataagcaacgcctgcaattgtagcttaatatcgcttaactgcgcttgctgctgttggttctgttgcttcatagttcgaatgtcttcactgtccggtatcaataccaaacactcatttaaaatattcaccgtaaaagtgaaatccgtctcaaaccttgtatcctgaaccactgccctttgaggtgtatcaccggcgatggtacagttttgttaccgtcccgccatgtaatagagacatataatagagaatggctgtatttatggaatacacaaaatcatctaactgcgtgtcttgtagatagaggttttcctgatgaaattagaaaattactggggatagaatgaatatatatgacggtatagtatcaaactcgttacttaagaagtttccatcgggttatcctgcaaatgtactattgactaattttgtggcgaattttgttgatttagaagacgttcttgcctgtgctggtttattttgtccaacatttattgaaatagataatgtactaatgaatatcttttagatatagactggagaccttcgttcaaaattgatggtcaatttaagttggcgctaattaaaggttttaacttggaaaattctgtttatttaggttcagcaattaatttattcgaattaaagaaaaaactcaactagcaatgcgcaaattataggatctcttgattaatatggaacaattactaaccaaaaccgaaatgccagaatggttttcttacccacgtgaatttctcagaatagttgagcaaaatttacttaattttgatccttggattattttggaaggagagcggctcagggttcgttttggtggtttaaaaaaaagatacccaaatagaaatattattccttttgcctgtcgggaagataatgatgatgtagcgtgttgggataaaaatagccgtcatcaggttattattattcacgattttgcaagtgaaggttatgaatatgtcggtaagtttgattcattttgggattggctcagaacggccttagaagcaactatcgaatacaatgagtaaatattaatgtatcaacaaagccggaagactgaagtggcaagttaccgttgatgggagaacctagaacatatttcaaagcaactggtgggcatattatagtcttcgatccagatgggtgccgcatagcggatataagtaaagaaagaataaaaatagttgaatgaaaccgttcacccaaaggacaatattttatcccaactggtagtgatacaaagtttgcgagtaaagaaatacccgatgtaattaaaaaattataatagcccttgctataaattagcaaaggctatttttttgtttataagataaacgctaaacaactactgctttgctggtacaagcaagctcaatacaaataaactactggcggctaatactactgatgggcctgcaggggtgtcatagaatgcagagaaagttaatcccccagtgatagcaaacatacctacagcgacggcaatcactgccatctgttctggtgaacgtgaaaaacggcgcgctgttgctgcgggaataatcaatagtgacgtaatgataagtgcaccaacaaatttcattgccaacccaattgttaatgcggtgatcatcatcaattttaaacgttcgcgttgaatattcacaccatcgacaaaagccatatcttgattaatagtcattgaaagaagtggacgccatgaacggataatcactaataaaacaataacgacaccaataaaaatactgatcacatcttggtaattaacggagagtaaatcaccaaagagatacgccattaaatcaacacgaacattggccattaaactgacgacaacaagccctaaagaaagggcgctatgagccatgatacctaacaaggtatcaacagaaagttgaggctttagttctaaccaaactaataaaatagctaacagcaaagttacggcaataacggcataaaaaggctctatattaaacagcaggccaaaagcgacccccaataaagaggcgtgggcgagggtatcgccaaaataggacattctgcgccaaacaacaaaggagcctaatggacctgcggccatcgctaagagcataccggcgatccagcccggtaacagcaactcaatcatgatgacactccttattatgttggtgatgatgacgataaatacccagttgttcagcaccacgactaccaaacatagctataaattcagggtgagaagaaaccacatctggtgtacctgagcagcagatatgaccatttaaacagagcacttcatctgttttagccataaccagatgtaagtcatgtgacaccattaaaattgcgcagcctaattcattgcgaagctgattaattaaatcatagagggctaattgaccatttacatcaaccccttgagtgggttcatctagaactaacagttgtggttgattaagtaaagctcgggcgagtaaaacacgttgtgattcaccccctgataatttttgcataggggcgtttattaattttgctgcattgactcgttctaaagcaggtaaaatatctttatctttaacacccggttttaaggtcataaaccgcttgactgtcaatggcatagttggatcgagatagagtttttgaggtacatagccaatacgtaaactatgttgacgttcaatctttccagaagagggagccaacaaccctaaaaccaaacgaataatcgttgacttacccgcaccattagggccaagtaaggtaagaatacggcctgcttttagattaaaagagatatcttttagaataacgctttcaccaaaagagacaccaaccgattttaaacgaattaagtcagacataaaattagcacttgcagaatcattgaaacgttataatataacatttccaatgacgtttcacgagaattttgcctatgttacataaaaacaacaaatttgcgcatggttttttaattaaatcatgtttagtgactgctatgatagcctcatttagttcatctgttcaggcagatgttgttgcttcaattaggccgatagggtttattgcggcagcaattgctgatggtgtaacgccaacagaagttttattacctgatggggcatcgccacatgattatgcattaaaaccttcggatttacgcaaaatcacctcagcagatttaatggtatgggttgggccggatatggaagtctttttagatagaccattaaatagacttagtgacaaaaataagctggctttagcggaaactgacaaaataaagtcgcttttattgaaagatgataatgacaatgtgcataaacatgaggaaaatcacgaacatcattctcatggtgattataatatgcacatctggttatcaccagagattgcgttgtcgtctgcaaaacagatccacgataggttagtgacgctctatccagataaaaaagaacttctggacgtaaacctaagtaaattcagcgaacaactcaagcaaacagataaaaatcttgttaatattctgtcgcctgttaaaaacaagggttattttgtctttcatgatgcttatggctacttcgaaaaacattataatttaaagccattaggtcattttacgatcaaccctgaaatacaaccaggtgcacagaaattacatcaaatacgaacacagttggttgagcaaaaagccacatgtatttttgctgagccacaatttaggccgacagtaattgagacagtggcgaaaggcactggagttaaaatgggggtattagatcccctaggaagtgggattgcattaactcaagatagttatgtgaaattccttacccaattagctaaccaatatgcgagctgcctgaatgaaacacaataaggaattaagaacgtgcagcagaagacgagatccattgcacaggtatatttaaatttacccttaccacataaaattatgcttggttcgttaactgcagcaacactggctgtcgcaatatggcggccagttgtgcttcacaccgaacaaagcagagaagttcctatcagtattcagactcccctaacaacccaaggggaaaacaccgacgatattattaccgacagtagtgatcagctaacagatgaaggacttgtaggtgctgatgatggtgtcgatactagcaccgcagtggcacaggttcctcatacttatattgtctccagtggagattcattaagttcgatattaacgcaatttggtatcgactcagctgatattgcaacgctctccaatcaaaataaagatctcagaaaccttaaaataggccaaccaataagttggaaacttgatgatgatggtttattgcaagagttaagttggggcgtttctcgccgagaaactcgtgtttatacgcgtacggaaacaggttttactgaagcaaaagagttccaaaaaggcgaatggaaaaatagtgtgaccacaggggttatccgtggtagtttctctgcaagtgcaacaaatgctggcttaactaacgcagaagctcgcgcagtgactaaagctttgcaatggcaattagactttagaaaattacaaagtggtgataaattctcagcccttttttctcgtgaagtcttagatggtcgtaccgaacagagcgaacttattggtgtgcggttacgaagtggtggtaaagattactatgcttttcttgctgaagatggccgctactatgatagccaagcaggtggtttagaacgtggttttatgcgttttccaacggtaaaacagtttagagtctcttctcaatttaatcctcgccgtatcaatcctgtcacaggccgtgttgcaccgcataaaggggttgattttgctatgcctgttggtacgcctgttttagctacaggagatggtgaagtcattgtctctaaatacagtggtgcagcaggtaattttattgctatccgtcatggtagccaatataccactcgttatatgcacttacgccaactgttagtcaaaccgggacaacgtgtaaaacgaggtgatcgcattgcactatccggaaatacagggcgctccacagggccacacttacattatgaattatggatcaaccaacaagcagttaatccattaacagctaaattacctcgtgcagatggcctaacaggcaaagagaagcgtgaatacttagctaaagtaaaagagatcatgcctcaattaacgttagataattgacattaaacaagaagttaaagacataaaagcggatgattgatatcatccgtttttgttttaatgatttttacgcctatttagaggtgtcagttcagcgagttatctgatgaataaagaaaaagatacagatagtaaagcgggttatgtaccgacttttcaccgcgcctatttgcatcctcgtcattggggaacctggtttggtgcaggcgtattgtgtgcattagcgtatatgccggtaaaatggcgtgatccgctccttgcttctataggtcgttttgttgggcgtaaagcgaaaagtgccagacgtcgtgcagatatcaatttaagatattgttttcctcactgggataaagcacaacgagaagatgtgcttgataaaatgtttgaaacagcgccacagtctttcgtgatgcttgcagatctttgtttaagaggggctaaacacacattacagcgtacctcttgggaagggatagagattatagagcgcttaaaagcacaagggcgtaatgttatttttatggtaccgcatggatgggctgttgatgtacctgccatgttattggcagctaaagggcaaaaaatggcagcaatgtttcaccaccaaaaagatccggtgactgattatttatggaataaagcacgttaccatttcggcggacgtttacactcgcgcgaagcggggataaaaccttttatttcaacggtgcgccaagggttttgggggtattatttacctgaccaagatcatggtgcagagcatagtcaatttgtggatttttttggtacctataaagccacattaccggcgattggccgattaatgaaagtatgcagagcggccattgtgccactgtttcctgtttactgtcataaaacgcatcaactaaagattattatccgtgagccgatggatgatatagaagggcaagatgatcgttatattgcgcgtcggatgaatgaagagctagaagcgttagtctcaccaacaccagagcaatatacttggatcttgaaactattaaaaacgcgtaaagagggggaaatagaaccttatgcgcgtgagaatatcctagactagtccattgctggtgaacgaataggaagataaaaaaacgggcactatttaaagtgcccgtttgctattttgctataaaagaataagaacgattattctacggtaaggatacgacaagtattggtacttccgatcgtgcccatctggtcaccttgcgtgactaagactaaatcacctgaaactaaaaagcctttttcacataaacgcataatagcttcattagcggcagcaataccgtcagtatgagtactgcaataaacaggcgtaacacctcgataaagtgcagtttggtttaatgttttctcatggcgtgacatagagaaaataggtaaaccggtgctaattcgtgacatcatacgggcagtacgaccggactcagtcatagcgataatcgcattaacgcctttcatatggttagctgcatacatggttgacatggctatcgcttcttcagcattatcaaataccatatctaaacggtgttttgatacattggccgcaggcattttttccgcgcctaagcagacttgtgccattgcggctacagtttcagcgggatattgtcctgctgctgtttcagccgataacataacggcatctgtaccatctaataccgcattggcgacgtccatgacttctgcacgagttggcattgggttagttatcatcgattccatcatttgagtggctgtgataacaacacgatttagctgacgagcacgacggatgagttttttctgtaccccgactaattcaggatcaccaatttctacgcctaaatcaccacgggcaaccatgacaacatcagaagcgagaatgatctcatcgataatttcatcattggcaacggcttcggcacgttcaactttcgcgacaatttggcactcacagcctgcatcacgtgctaagcgacgtgcataattaagatcttcgcctgttcttggaaaggagacagcaagataatcaacaccaattttggctgcagtaataatatcttgtttatctttttcagttaatgcttcagcagaaagaccaccaccgagtttattgatccctttattattagataatgggccaccgacagtcacttcagtgaaaactttcaggccttcgactttaaggacttttaattgaacacgtccatcatcaagtagcaagatatcgccaggaacaacatcggcaggtaaccctttatagtcaataccgactttagtttggtcgccttcgcctttttctaaattggcatcaaggagaaatttgtctcccacattaagaaatactttgccttctttaaatgtcgaaacacggattttcggaccctgcaaatcgcctaaaatagcaacatggcgaccaagtctagctgctatttcacgggtgcgattagcacgagcaagatgatcttctgcagagccatgagagaaatttaatcgaacaacatttgcaccagcagtaatgattttttctaggttattatcacgatctgttgctgggcctaaggtggtaacaatttttgttcttctgagccgtctggacatgcattactccgttgaccttgaacgaaaggtattggctattggataaaacggaggtaagtaacattctatccaatatgttaagtgaaacgcttcaagctaattgtaacatacttaggtgttttcatcatatgtgagagttagctcgcagttatgctaccatttttcaaaaagttatctagtcaagggcacactgctaaatgtgactatactaacaaattcatttaaaacggttacttatcaaagcgcgaatcgcgtaatgcttctttgacacgcttcaagttatctctaaattttggccctcggcgtaaaataaaccctgtagccagaacatcaataacggtaagttgtgcaaggcgagaaatcatcggcatgtagatatcggtatcttccggtacatcaagtaagatgggtaacgttgcttcggcggctaataaagagccagaagtggtaatcgctattactgatgcatcattttcacgtgcaattttagcaatttcgactaaatttttagtacgacctgtgtgagacacaatcaccacaacatcaccgtcgatactatttatacagctcattcgttgcatgataacatcatcaaaataggtcacgggaatgttgaaacgtgagaatttattcatggcatcatgtgcgacggcggcagaagcacctagaccaaaaaacgagatttttcttgcttgagtaagaatatcgacagctcgattaataaccgcaatatcgagattatttttgacattctctaaacccgccatcgcggattcaaatattttattggtataagcagagacagaatcggagtcatcaatgttacgattgacataaggtgtaccattggcaatgctttgtgctaattgtaacttaaaatctggaaatccttttgttgccatgcgtcgacaaaaacgatttacagtgggctcactaacatcagctgttttcgccataagagcgatacttgaatggatcacggtttgtggtgttgttaaaacaacctcagccacttttttttctgatttactcaagatgtccagactagactgaaccctttccaatatattcattaaatatacagatccttggctttgccaatttcaataaaaggagaaatctataacggttttatgaaaatatactacgcatataacagcacttacatcgctgacagccccttaaaagggcttttttcatcaaagtatgacctgtgtctaactttcaaagctgaaaacaattaacaaaactgttgtaaatttacatagaaatagaaaaagctagacataaaaaaccggtggttaataagatgtaaggggcgttaaagactaaaacacgcaagcgtatttactgcgtacacccaaaagagtacattaatacgaaattatgtaacaaaattacaaaatctcatcatgaggagacgtactatggcagcgatatcgactgctcaggcctgtgatctggttatcttcggtactaaaggggatcttgcccgtcgtaagttaattccatcactttatcaactggaaaaggcaggatatattcaccctgatacacgtatcatcggtgttggtcgtgctgattgggatgtagctgcttatacaaatgttgcccatgaagcattacaaacttttttaaaagaagagattaaccctgaaatttggcaacgtttaagtgctcgtctcgatttttgtaatcttgatgtcaatgaaactgaccactttattgagttagcaaaacatctaaaacaagacaaattaccggcgatttactattttgcaatgccaccaagtactttcagtgcgatgtgtaaaggtttgggacatgctaaattaaataaagagccaaaccgtgtggttatggaaaaaccactaggaacagatttagcgtcttcagtttctattaatgatagtgtggcgaaatactttaaagagagtcaaatttatcgtatcgaccactacttgggtaaagaaaccgttttaaacttattggccttacgttttgctaactccttatttgttaataattgggataacaaaacgatagatcatgtccaaatcacggtggcagaagaagttggtattgaaggacgttgggggtatttcgatcaagcgggtcaaatgcgtgatatggtgcaaaatcacctattacaaattttgacgatgatcgccatgtcaccacctgctgatttaacggctgatagtatccgccaagaaaaagtgaaagtgctgcgctcattacgtcgtattgatatgactaatgtccgtgaaaaaacggttcgtgggcaatatacggccggttttgtacaaggtaaaaaagtaccgggctatctggatgaagagggtgccaataaagccagtaatacagagacctttgttgcaattcgtgctgatattgataactggcgttgggcgggtgtacccttctatttaagaaccggtaagcgtatgccaagtaaatgctcggaagtggtggtctattttaaaaaacccgctctgaatattttcagtgaaacctatcaagagttaccacaaaataaactcactattcgtttacagccagatgaaggtattgatattgaagtgctaaataaagcaccaggtcttgatcataaacaccgcttacaaactactaaattagacttaagtttctccgaaacttttaatcaaactcatttagctgatgcttatgagcggttgttgcttgaggcaatgcggggtattcaagcgctatttgtccgccgtgatgaagtagaagaagcatggaaatgggtcgattcaattattaatgcatgggaatgcgataatgaattacctaagccataccaagcaggaacatgggggccggttgcatctgttgcaatgatcactcgtgatggccgctcttggaatgaaattgagtagggaatttcatcgtcagatatagtccctaactaatataaataacaccgtaaaataagaggtcgagttttgcggtgtttttttattaagcatgattactgcgatataaatgaataaattaataacaagttcagctaagaattgattaactatgcagtgtattgcaatcttcaacttaaaacctaaataaaaccaatcaattacctaaaaaatttttgcagaagatccttgctttaaataattcggcatgatagaaatatcatgtaacatttatccatattatatgagggttcggagtatatcgtgcggatggtctgcgcgatgaaagaataaataatcatgactagcgccaaaagcgtaaaagttaaacgttctacttataagttattcctttctgctattttatccagcgaacactactggtgtggcgcattatagaaatttctcatcctacttcctgatatatcaggaaataacgttgccttaacgttcggttttataccgccagaaagactatctgcatattctctatcttctgcgcaagaaacgtttaggcgtgctttaaacgtgtatgagagatgaaaaatgatttattggatatttttagttttagctattatctgtgaagtgatcggcactttatcaatgaagtatgccagtgtcagcggtggttacactggtatgatcgttatgtggttaatgattgccacttcctatatctttttagccatagccgtaaaaaaagtggcattaggtgtagcttatgcactgtgggaaggtattggaattgtcattattacaacatttagcgtgctttggtttggtgaatcactgtcagcattaaaattaggtggtttagcaatgttaattgcggggatcactttgattaagtcaggcactaaaaaatcggtggttgctaaaaaaacaaccgattcggtaaaaaatattgccggaaaagccaaacaggttgctactgtggtaaagggagttaataagccaatttcttctaatgttaaagaggcttaatatgttagctcaatttgaatggtggcatggcgcttttcttcttcttgctgttgtgcttgaaatcgtggccaatatattcttgaaaatgtctaacggttttagtcgttgggggttgggaatattgtcattgctttgtgtgttaggcgcatttagttcattggcaatggccgtaaaggggatagagctttctgttgcttacgcactatggggagcttttggtattattgccactatcgccgctgggtggatcttatttaatcaacgcctaaattataaaggatggagtggaattatattattattagtcggtatgataatgattaaattcgcttaactctattttacatagcaaagtaaagcatattaaataaaaaagctaagtttcttgtaaacttagcttttttgtttctataaatatctattaaaaatgatgtgtttaaaataacaaaatttatagtaaaaatagccttactatttcaacactaaaaagagtgaaatttgaagatgcaatagaatctatcactaacaacggtgagtatattgcatttattatgctaagcgcagttgctattaatttatcattgatgttacttttcatgataattaaaaaagaaaggagttgaaatgaaacggatattagtcgcgggagcaacaggatatttgggtggttttttaattcaagaattaaaaaaacaaggatattgggtacgtgttttagttagaaatcatcaacaagcgacaaagtttgcggatgttgatgacatattcatcggcgagatcacaaaaccagagcaactttctttgattgctcaaaatattgattgcgtgatatcaacggtagggatcactcggcaaaaagaagggttaacctatatggatgtggattatcaggcaaatgccaatttattagaagaagcgattaaatcgaaggttaataaatttatttatatctcggctattgatggcgaaacacaccgaaatctaaagatttttcaagcaaaggagcgctttgttgataaattaaaacaagccaatttagcatactgtattgtaagacctaatggttattttagcgatatgggggattttttacagatggcagcatcgggtaaagtttatttatttggtgatggcgaacaaaaaataaatcctatctctggaaaagatttagcgcaatttattgtcgagaaaatgacaaccaatataaatgaattcactgtaggtggaccggatattctatctttgaatcaaatatgtgaactcgcaggaagcgcattagataaaaaaattaaaataatccatttacccgatacgttaagaaaaataactatttttacgttacgtcattttacgagccaaaaattttatgggccattagagttttttttaacttttatggcaaacagtcatattggtatgtgttatgggcatgatcatttatcaaattattatattgaattagctgatccgacatataagagaaaatagtacccgcatgtgcgggtgctaataaaaaattagagagcagcgatgattttaatttctactttatattcaggatgcatgagttgagcctgaacggtacaacgtactggcgcgctccctttagcaacccatgcatcccatgcttgattcatacctgcaaaatcggctttatcggctaaaaatagtgttgcatcaaggatcttacttttatctgatcccactctttgtaataacacatcaatagctgctaatgtatctgcagtttgttcgattatatcccctgataagttttcaggaactgcagtgtaatagacagtatcattataaataaccgcttcagaccaacggtcctctggatcgatacgttttatagtcacgataaattctcctttgtattaacaacgtgggtggtacttttagctatccactggcataatttacgtcttattttataaaaagagtatgcctgtgtcagacgattttgcagaaaacgggattttaacccgacgcgttcctggatttcatccccgtgaagctcaacgacaaatggcgatatcagtaacagaggttattgataaacaaggtgtgcttattgcagaagcggggaccgggacagggaaaacctatgcctatcttgtgcctgcattacgttctgggaaaaaaactatcatctctaccggatctaaggcattacaagatcaactgtatagtcgtgatctccccaccataatagaagcgctagactacgatggtacaacggctttattaaaaggtcgctctaattatttgtgtttagaacgtttagatcagcaaatgctcagtggcggtgatttagaagcagaagtacttgctgatgttatgcatgtacgccaatggtcaacgcaaacagaagatggtgatattagtcgctgtcatagtgtggcggaagatagcaaagtatggccattggtgactagcactaatgataattgtctgggcagtgattgtcctcgctacaaagagtgttatgtattaagtgcccgtaaaaatgcgttagccgctgatgtggtggttgttaatcatcacctttttatggcagatacggtagtaaaagatactggttttggtgagctgatccccgatgcggagataatgatcttcgatgaggcgcatcaaattcctgatatagcgagccactacttcggtcaacagctcactagtcgtcaattattcgatctagcgcgagatatgattgtggcgtatcgcactgaagtgcgtgatcaagtgcaactgcaaaaaagtgctgaccgtttaactcaaatggtacaagattttcgtcttagcttaggtgatacgggttttcggggtaacttaagggaactattacaaaataaggaaaccaaacgctatttaaccttcttagatgatgcgttagagctaagttatgatgtaatgaagctctctttagggcgtagccaattactggatagtgcgtttgaacgggcaacactttatcgtaatcgtttaaaacgcctaattgatacgacgattgccggatacagttattggtttgaaagctatggtcgtcattttttactggcgatcacgccactttcggttgctgataaatttcgtgagctgattaagtcccataaaagtagttggatatttacttctgcaacactctctgtagatgaaaaaatgtcttattacacagatagattaggactggaaaatgccacgacattaattttaaatagcccatttgattatcaacatcaaacgttgctctgtgtaccacgttatttacctccgttaaatcaaccatacaccgcgaagcgtttagccgctatgctggctcctgtgatcttaaaaaatcaggggcgttgtttttttctttgtacctctcacgctatgatgcgtggattagccgaagagtttaaagccagcttaccacttcccgtgttaatgcaaggcgaaatggggaaatcgcaattattgaaaaaatttgtttcctcaggcaatgcgttacttgtcgcgacccaaagtttttgggaaggggtggatgtcaggggagatacactttcttgtgtgatcattgataaattaccctttaccgcacctgacgatccattattaagagcacgtattgaagattgtcaattacgtggtggtgatgcatttcgggatgtacaaatccctgatgcggtgatcactctaaagcaaggcgtcgggcgtttgatccgcgatatacatgactatggtgccattattgtttgtgatgatagattagtttcaaggccttatggggaagtgtttttaagtagtttgcccccatcaccacgaacccgttcattagaaaaaaccagttattttttaagccaacgggcacaacgaaatgaaatagtgtcggagtcataatagtgattacatatgatgtgtatttattctgttgaatactattatgatattattctttctctttttacttattgaatctgccggagttatggcgtgtcactgcgaattttagcaattgataccgcaactgagtcttgtactgttgcggtttggaatgaaggtgtcgttgcttcacgttttgaaatttcaccgcgtgaacatacacaaaaaattttaccaatggtgaaaagtgctttagaagaagccaatttatcactgcaatccttagatgccctcgcttttggtcgtggtccgggcagttttaccggtgttcgcattggtgtcggtgttgcgcaaggtatcgcactaggggctaatttgccactgattggtatttcttctcttgccaccatggcagaaggcgtctttagaacaacaggcattaagcaagttttagtcgccattgatgcccgtatgggggaaatctactgtgcccaatatcagcgtaatgacgctggcatttggtctggtgaagaaacagaagcggtaatgaaaccagaacaatttgccgaaacgctacaagctaccacaggtcgctgggcaattgcgggtacggggtggcaagcttatcctgatttagctttatcattgccttttaccgtggttgaaacgcaaattactttgcctgcggcacaagatatgttgccacttgccgttacagcatggcatgaagggaaagcaactaaagtagaagaggccgagcctgtttatttacgtaatgaagtcacttggaaaaaattaccaggacgggaatagattgttagcgattttctgttagaagtgacagagtgacgctatacttatcttagagtgtaacgtacttaatgacgtacaaagaggtggtttatgaacagacaattaaactaccgtttggtaagtaaagcgctatttttatctggcgctctattactaacgggctgcgtctctatacctgaatctattaaagggacaacagcaactcctgttactgacttaaatgtagttctagcggcaccggagctttatgtcggtcaagaaggtcgttttggtgggcgagtgatagaggttaagaatctaccttcaacaacccagttagaaattgctgtgatgccactttctcactatgatgcggctcctgagttacagcaaccttctgttggtcgtctttatgcgaatgttactcattttttagatccaacagattataaaaatcagtatgtcacggtagtgggtacgatcaaaggtgtaaaaacaggcaaagtgggtgaagccgtttatccatttttacgtatcgatgttacaggaatgaaacgctggacattaacgcaacaagttattatgcctgcgcctgttatgacatggggatactatggtaatgccccttactggtataattatggctatggtggctatggggcatatccatatggtactggccaagttgtccccgttttggagtaataaactagaataattgttaatgacgatataatattttacctttatgagtttgaaacggtgtataatcaatacctgtaatatattagatggcaattatctaatataattattaaagatgaagacaacaaaagagagggcggttttgaccgccttcttttttgttaaacataaaaagaaaaaatttagtgatacacttcgcatcttcacaacagaaaattgtttgtgctggtaggatgagttaatactttgttaaaaagaaacataatattaaccaagaagtgcgattaatcaggagtactactttggaaaaagtctggcttaaacgttatccggcagatgttccggctgaaattgacccggaccgttttgcatctcttgcagagatgcttgaaaacgctgtcgcaaattacgcagatcaacccgcctttatcaatatgggcgaggtcatgacttaccgcaaactagaagagcgtagccgtgcttttgccgcttatttgcaaaatggcttaggattgaaaaaaggtgatcgtgtcgccttaatgatgcctaacttactgcaatatcctatagcgcttttcggcattcttcgtgccggtatggtagtggtcaatgtaaacccactctacacaccaagagagcttgaacatcagcttaatgatagtggcgccacagctattgtcattgtttctaactttgcccatacgctggaaaaaatcgtctttaataccagcattaaacacgttattttaacacgtatgggagatcagctatctcgtcctaaagcgacactggttgattttgtggttaaatatatcaagcgattagtcccaaaatataatttgcctgacgcgatatcatttcgtcgagcgatgcatttaggctatcgaatgcaatatattaagccagaaattactggagatgatttagccttcttacaatatactggtggtaccacaggaattgcgaaaggcgcgatgttaactcatcgtaatatgttggctaatctagaacaagctaaagccgcttatgttcctgcacttaatgtagggaaagagctggtggtaaccgctttacccttgtatcacgtttttgctttaaccgtgaactgcttgttatttattgaagttggcgggaaaaacctactgataacgaatccacgagatgttaaaggcactattaaagagttatcgcgttatcctgtcacggcgattaccggggtaaatacactatttaatgcttggctacataatcctgagtttcgtcaacttgatttttctaagctcaacctttctgttggtggcggaatgcccgtacaaagtagtgttgcgaaagagtgggaagaattaaccggtaagcatctattagaaggttatggtttaactgagtgttcgcctttagtaacaggtaacccttataacctgaaaaaatacagtggtagtattgggcttcctgtaccttcaacggaagtaaaatttatggatgatgaaggtaatgaagtgtctcgcacagaaggcggtgaaatgtgggttcgtggccctcaggtcatgaaaggctactggaatcgccctgatgcgacagcagaagtactacatgatggatgggttgccacaggtgatattgccacaatggatgatgaaggctttatccgcatcattgaccgtaaaaaagatatgatcttggtttcaggatttaatgtctatcctaatgaagttgaagaagtggttactgcgcacccgaaagttttagaatcagcagctattggtgtaccgagtaaaagctcgggtgagactgtgaaaatctttgttgtcaaaaaagatccctcattgacagaagatgaacttaaaactcattgtcgccgttacttaacgggttataaagtacctaagattattgagtttcgagaagagctgcctaagtcaaatgttggtaaaattttacgcagagaattaagaaatgaagaaaaacagttgaaaacatcaactggatcttgatacaacaaagtataacctttgataaattcgccggtttataccggcgtttttgtctttacgaaaaagtcattagacataaaaacacaagagaaacctgttttgaattatcaatttatcacgacaaacacagcactagaagatgtctgtaaagcagcgtctgaggtatcacaaattgcattagatacagagtttgtccgtatacgcacctattacccacatttggggcttatccaaatgtacgatgggaaacagatctctcttattgatcccctgaccattactgagtggactccttttgttgaattattaactaatcccgcagtccttaaatatttgcatgctggaagtgaagatcttgaagtgttttctcatcaatttggttgtgttccgacacccatgatagacacccaagtcgtggccgcttttctgggctatcccatttcttgtggctttgcgaccttagtagaaaaatatgaacatattgctctcgataaaagtgaatcacgaacagattggctggcacgcccattaaccgaaaaacagtgccaatatgcgagtggtgatgtgttttatttgttacctctagctaagaaattaatcgcacaggcacaagaagccggttatatggacgcgattgttgatgagtgcgaaatgatagccgagcgtcgccaagagaccgtatcaccagagcttgcctatcgcgatattggtaatgcatggcaattacgaggtcaacaattggcatgcttaaaaatgttggcagaatggcgtttaaatcaagctagagcccgtgatatggcattaaattttgttgtaagggaagagcatttatggtcagtagcacgctatttaccgacctctcttgctgaattagatgcgctttctctatcggggcaagaaattcgttgtcatggccgtcgcttgttggattttgttgctaaagccaaacagatcaaagatgaagattgtcctgagcctattggcaatttaattgaacaacctaactataaaaaagcctttaaagcaataaaaacggtgatccaagaggtaagtgaagggcagcgttataaccccgagttattagcctcaagaagacaaataaaccaattgcttaatattcactggaaaattaaaacaggggagcctgaattgctttcacgctggcgtaaagcattattagcagaaaaaattactgcaattttggcgcaatatccttaatatcacgttatattaattcaggctaaagagtaattatttagcctgaaattttctcaaacccaatatgagtttctatcatccttctatcatccaataaatagcaactccaacttattattaatgaatgtttaaaatagcaacaatatatagcgctatttgcacatttgtattcagccagtttatatataattaaaaacacagagccaagcaaatatgtgatagtttatagctggctctgtggatcattagcttatatcagcgaattaaatatgatcacttaggtgattcttcattttcaggtaatgtcacatttaattctagtacggagatatcatcgcctttctgctcaaactgaacagatagcatatcgggatctatctgcacatacttacagataacacctaataaatctcttttcatatcaggtaaataagctggctcagtatcgccacgtcgacgctctgctacgataatttgtaggcgctccttggcaatatttgctgtcgactttttacgcgacagaaaaaaatctaataaagccatcttttaccccccaaaaaggcgttttaggaagccttttttctcttcttcaataaaacggaatggatgttcttcacctaataaacgatttactgtatctaaataagctttacctgcatcagattcactatcaagaataacaggctcaccttggtttgatgaacgtaaaacggattgatcttctggaataacacccagcagtggaatacataaaatttctagcacatcttccatacttaacatatcaccacggcttactcggcctggattatagcgtgttaatagaagatgttctttaataggatcttcgcctcgttcagcgcgacgtgatttagaggctaaaatacctaaaatacggtctgagtcacgtacagaggagacttctgggttggtggtgataatggcttcatctgcaaaatagagtgccataagtgcgccactttcaatccctgcaggtgaatcacaaataataaaatcaaaacccatttcatccagttcatctaacacttgctctacaccatcacgggttaaagcgtctttatctcttgtttgtgaagcagggaggatataaaggttttctgtacgtttatctttaatcagggcttgatttaaagtagcatcaccttgaataacattaacaaagtcataaacgactctacgctcacaacccataattaggtcaagattacgtaacccgatatcaaagtcgataacaaccgttttatgccctttttgagcgaggccggtagaaatggccgcgctggaagttgttttaccaaccccacctttacctgacgtaacaacaataatgcgtgccatggagtgattccttgtcgatgctctaaattaagttctcgattgttaattcattctcttgcaaactaagttggactgatttgccaacaaaatctgtaggaatttggtcgcttagccaatattgaccagcaatggaaactagttctgcagataaatgtgtacaaaaaatatggctctcttggtcgcctgatgctccggcaagaacccgtccacgcaatacaccataaatatgtacattaccgtctgcgattaattcagcgccagcactgacattgcttaacacgactaaatcgctatttggtgcgtaaatacgttgccctgaacgcactggtgtatgaatgattttggttttttgtcgtacatttatcggtacttcattcgttttatcgttatttgcctgagctgctggcttagttattttaccttcatttagaataggtaactgtgcggcaattatcgcttctttttgttgagcgtcatgactaccactaattcccacaacacgtaagccagcatcttctactattcgcctcagttttttaaaatcaatcgtttgatctgcgatagcagagacattgataacaacaggcgcatttttcagaaattgaggcgcttgggcaattttatctgaaatagcctgacgaataaccttcggtgatccatcatttaaatgaagtaccgagagggtaaaattactgccttttaactcaatgggcgtgtttgacatctatctgactcagtaaattttctataatctggcacaaaaaaccagagacgatattacgaaattatataagcatgttatatttactaaaatattcaggcaagtcgcttattttaataattagagtttaatgaaaatgatttgtgcaatttaccgtagtaccaagcgtgatcaaacttatttatacatcgaaaaaaaagatgatttctctcgaattcctgaggaattattacaaagttttggtgaaccacagtttgcaatgttgctagatctcgcgcaaagacagcgtttagcgaatgcagacatagaaaaagtcaaacaagcgttgactgaccaaggtttttatctacaagtgccacctcccgtcgaaagtatgttaaatgcttatttagatgaattaaaaaattcagaaaaaactgaataaatcatcgagataaaaggagcataaatgttcaaatattcgttcatcgcggtgattgtttctactgttttgctatctgcttgtgcagatagccatcagaagagtgcagaaaaaaaacctgtaacaagtgaaattgccaatattgcgacatcggcaccggctcgctggaaacagattgatgttgtctcacttgaacaggcgtttccaaaacagtcacggacacctgcacaatttcctgcttatgtagatgctttaaaacaaaaagcggctgaattgggttataaacctgaaactatcaattttgccttttcggaaattcactttattgacagagtggtgaagtcagaccgtaatcagccagaaaagaaaattactttagatgtgtatttacctcgagtggtgacgaaaggacgtatcgcagaaggggcgaaactttatcaagctaaccaacaaaccctagcgcagatcagcaatcaatatggtgtgcctgcaaattatattgttgccttatggggattagaaagtggttttggtcgagtacaaggaaaagaagatgttatctcagcactggccacattagcttttgaaggtcgccgtgaggccttgtttagtcgccaattaatggccgcacttgagataatcgaaaatggacatttacctgtaggccagcgtttaaaaggctcttgggcaggcgcaatggggcagacacagtttatgccatcttcatttttgacttacgctgctgatggcaatggtgatggcaacattgatatatggaatagccgtgaagatgcgtttgcttcagccgctaattatttagcaaccgagggatggcaacgcgatctcccttggggggaacaagtcagtttacctgctaattttaatcaacagttggaaggtataaaaacagagcaacaaaaaacggtcgcacaatggaaggcgctaggggtgcaattacccgctaatagccaattaagtgatgatatgaaggtatggctgataattcctgatgatgatttgcatagaagttatttagtcacccaaaatttccgtactatcatgcattggaatagctcttacttttttgctttgagtattgtgacgatggctgatggcgttgccaataaaataaatacactgccaactcaacactaaatcacgttagcagtgacataaaacacagcgatttacctaataaggaaaatattatgtatcaacatagagattgggaaggttcgttgcttgattttcctgttaataaagtgatttgtgtgggcagtaattatgcaaaccacataaaagagatgggctcggtgcgctctgaagagccggttatctttattaaaccagaaacggcgatgtgtgatattcgccaacctattgcgatccccaaagagatgggggcagtgcatcatgaaatagagttagcggtattaattggtcagccactgaaacaagccaatgaagatagggttgatcgtgctattgctggttttggtgttggtttagatctcactttacgtgatttacaaagtcaattaaaaaaagcgggacaaccttgggagaaaagtaaagcgtttgatggttcagcgcctttgtcgggatttattccggtgaactcttttggtgatccccaaaatgttgacttaatgttgaaagttaatggtgaaattcgtcagcaaggcaacagtcgtgatatgctaacgcctgttttaccccttatcagttatatgtcgcgcttttttacccttcgcccaggtgatgtcattttaacgggaacacctgaaggtgtcggtcccttagcatcgggtgatatgttggtattaagtgtcaatgaacatcagctgaccacacgggttatttaataatatgatgagcaataaggtaataacgtagagatgacacaggctttttggcagacaaaaactttggatgaaatgagtgatgatgagtgggaatcgttatgtgacgggtgtgggcagtgctgtttacacaagttaatggatgatgatactgatgagatctattttactaacgtcgcttgtaatcagttaaatattaaaacctgccaatgcagtaactatgaagatcgttttcgttatgagcctgattgtatcaaactcacgcgatataatttgccgacgtttgaatggttaccgatgacttgtgcttatcgcttattagcagaagggaagcctttagcggattggcatccccttattgcaggtaataaagcaaaaatgcatcaaggtaatatctcagtaagatatattgctgttcctgaagtggaagttgaagactgggaagatcatattcttaatcgccccaaaggacgcggttaatattgcgctctccctttgtgttacacagagggagagccattattttattgattaaacgtcattaattgatggcgttgattaaagaatttcttataggttaaatagcaagcaataattgttgaaatactggcggttgccatcaacataaaggtgaccataatttggtatttaaccgcttgtagtggatcaacaccggcaaaaattaatccagacatcattccaggtaagcttacaatccccactgtcttggctgcgtcaacggtcggaattaacgacgatttaatactatctcgaataatagccattgaagcaattttaggggttgcccccaaacttaacatttcttggatctgttgttgatgattttcaaaacgttgcccaagctgattataacaaagtccggtcgcaatcattgcattccccgcgatcataccggtaataggaataatttggataggggtaaaggcaatagcatgagtaaaaagtaaaatacttaaggtgagcaatgcccctgtggtaatagcgacaaacgagataataaaaatatctttaacgtatttactgcgttttttagcattataggcagcgttataacagataaataagaccattagaaatgtaaggataatatggtcgacgtcgaaaatataagttaatacgtagccaacaataaagagttgaattatcgctcgggcggtactccaaataatatctttctctaatgaaagtttctcttttcggctaataaatatagccactaagaccagtaacagagaaaaaataagagattcattactgattgtatgttcgttcataataatttatttgctcactgctcaataaagttaaaactaagggggtaatggaagtcaacctaaccttaattgttcatatgactcggtaagtggatcacatcatcggcatgtttgatttcattttgatcgtgagttacccataatgcagcgattttttgctctttgacataatgatggataagctcattgacttttattttattgtcttcatcaagagcactagtaatttcatcaagcaataacactttaggcaaaaactgtaggttacggataagtgagatacgctgtttttcaccaccagaaagttcattaatacctttatttaaaatctcattgggcaaattaaagtaatctaaatctttcgctaatttcttctcatcaacggcgattttgcgtagtaaataaggaaatttaagattgtcataaaccgtttcaccaaataacatcggggtttgagtacaatacgaaacttgttgtcggtattgttcaggagaaagggttaagtagtcttttccgtcaaagaaaagtgtgccacttgtcggtgataataaagaggcaatgatttttaataacgtactttttccacagccagaagggcctgtaatcaatttaaattcagaaggttgtagtgagaaagtcacattatctagaataattttgctatcgagttgaaagccaattttttccagacatagtagtgcgcgattattgttcattctgatcctatacatctagaagagagaagttatcactattatacaaggttaattgtataatgatcctgttccatatcagtgatctgataacaagatttaacttaagtataagagcataaaggtgtgatgataaattgcttttctctatcactactatcagtcaatcaatattaaatagccaataggggaaacagaaagataacgcagcataaaagattaagcatgataaaataggcctaatcatcagctcgtaaaattatcttaatataataagtcaagataggatgaatgttatttattatattgcgcataccattgctgtatatcttgaacgacttttccggttaatcgctcaccttgttgattataaaaaccatgatttaatttatcatatttaataaatgtcacattaggttgcgttatctcttgagataattgatggaatgcagccacatctacattgatatcatctaatgtttgaacaattaataccggagtttgcgtgttgcgcttaatcacctcaagtagatcaatagcaagatattgttgccaccataatttgctatgttcactaacaaattgctcatcaccaatttgattcgttattattgcattagcgagttgttgaaagctatttattgcttcttccacatgctctttaggtgttgtattgcgtatattgtacagtacatcatcaaggaaaaaacgaccaccgccatttaatgcgattgcagcgctaatatcatgacgttcagcaacaactaaatgaaccattgttgcgccttcacttcctccaagtaatacaatattggtgtaattaggggataatttatctagcactgctaaataatcagcaagtctttggttaggattatcatgtagtttatagtttttagggcaatcttctctttcaccattatcgtcggaataagtcaattgtgctgtaataccatacttttcaaccattaaaacatcactactcggtagccatctaccaaaggtttcttgaataaaagtattattttttatgctattacagtcagaaccttgcattaaaactaacagtgttttgttatgttcagcttgtttatctagataataaatcagttcgctattatcttggcgaatcagtttatgtgtgcttatttctgcgtagcttgatgttattgatgatactaagaaagtggtgcagagcaacaaagaacaaatacgcatagaacaaccttattaaccaagggagggtgagagagaaggatggctaaataatccatcaagacggttaattagccatatcaataaactgaaagtcaagtcgttaagtacttattactgattaatgaattggaacgtaataatcaatttccagtgtttttggtagttccataatgtcgctatctgtttctatacaaatgtagttttcaatatctggccctaaacgacgacataaccccaaagccggtaaagtataaaagtagatcttgatggcaaattgtttatattcttctaacgtgcctttaaattggaaacgaacataacgcccgcctgcaatcgctttttttctaaaaccacggggtctggtaaagtgatctaaattgtttaggccaatttcataatcaatctggatcttatctttacgtaatgtatttggctgataagaaattaacacactactttccgtaaagtttttatctgtgtacaacagaaaatcattccaaaactgatgacgaatatcttcatgtagcttgccaatatcctcgatagagcaaaagtattggtattgaataacataaagaaagctttcaggtagctcgataatatttggaatagggaggtcggtaacttcaaaattgatggggggctgaaaattgtcgctacacaacacatcaactttacggtattccgaaggagtaacgccaaaaacagctttaaagcggcgtgtaaaagattgctgcgaatcaaattgatagcgtagtgcgatagttaataccggaagtttagttaagcgcaattcagtggcggctttggtcagtcgtctaccacgaatataagaggctaatgttaagcccgttgcttgcttaaacacccgttgtaaatgccattttgtataacctgattttatcgcaacatcatcaagtaataacggcttttctagatttacctcgatccagagcagaagttctttaatcacttctatattaaacgaagataaagaattggaagggataagtccattgaactgagatgacatgatgatttcctgaaaagatattttgttcagtttacacaaaactgatacccatatattattacatacttatggtatgttttatgggttttttatcatgaaattaaaatcacggcaacaagagaattcagaacaaacacgcttagctttacttgaagctggacaatatctctttgtaaatcaatgctattatgatgtttccattgatgaaatatcacgttatgcaagggttactaaaggggcgttttatcatcactttagtaataaaaaagcccttttgagagagtgttatttactgcaagttaagcatgctgttcaaaaattagatgaagtgcctacttatgatgataaatggcaagagctaacggcgctcttctctctttgtgttgaccatatttatcagtgtaaaaacgagttaattcccttacaagaagttatctcggtattaggttggaaagagtgggaagagattgacgccaacattcttattcctcgtatccaacactgtgttgatatactctttgctgaaaaacagatctgtgcttattcaccggctattgtggtgaatttaatttatggttttattactcatattgctatcaatctaaaaaatgaagcgtcattgccgaaagaggcatgtagtgattttaaagctatttttgctgattttttaatcggggtaaaacaagcatcaccacagcgtcatcaacatagggtataaagaggtattaaaatacctctaagcattgtgcaaaagattaacaatcaacaaataattctgttcaattatcactgtattattgaatagcaaaacatagcgattcaataaagagataagtttaattgaactaactaaaaaataattaaaaatagaataagtaatctttcttaatatcgttaatctatttgagttaaataacctaatgtccacagtattaagcaatagcattattttttaagaaagtaacaacaattctttctgtttaaataaaaaagtatgattagtttaatttataaaataaatactgatattgtatgataaattggtcatgctttaaaatttatcctgttcattctaaaagataattaatcatttaattttttatcaatcaaatcataatgctaatggaatattatgtaacgaattgcttagtggacagtgaaatgaaatgtttatttcaaaaataaaaaatagatttcactatgctctaaagtttttgataaaaatgaccgacattatcaatgtgagcagtctcttacctgtctctataatctaaaaaataatctttaatttattttgttaacactagggaatgcactcttttttactaaagagtgcattctgatatcttacaaatatacagaaaaatcaaagctgtatattttgctggaatatgattatgtttaaaaacatcagtatagaaaaaaccgttaaagttatgctggctattttatttgtacttattatgagcattatttactttagttatgatgcttcaacacgctcttatcataactttgtttcatcaaataacttaagtcagcaaatgttgctgatgggaaaagcgcgttatcaaatggcggtgatcagagcgaatattaatggcttggatgggcagttaagagtgaatgaaaaaccttctgctaaataccttcatcaaactcaagaatatataaaaatcacccgtgaagagatccaccgttgggcggatgctgaaaagttaaccatggaagggcgtcaggttgctgatgatatgacgaaacgctttgatgagcttttagatatatttaccgatgccttagctaaattacgtaaaggacaattgactacgcactctgctagtcaaaaaatggatgaactcaacgagatcaccatgacatattatgccgtcgccaatggtattgagaataattatattgatattgcgaaaacctcacaacagcgcattatgctaatggcgttagtcacagcgattattgtcattatgctctttatcattatcttacgttggttctctcatagctttatcggcaatattaaagtgcttattaatatttttagtaaaatgagccaaggcgatttaagtatgcgagtggaaaatcacggtaacaatgaatttggtaagctatttaatgaaatgaataaaatgaaagtttcattaagtcaaatgattgcttcggtaaaaaatgcagtaaacaccattagcgtcagtgcaagtgaaatagcaacaggtaatactgacctctcctcacgtactgaagagcaggctagtgcgctacaacaaaccgttgcaagcatggagcaaatcaaaaccacggttgaaaaaaatgccgataactcacgccaagctagccagttggcattaagagcgacaacgtcagcacaaaacggcgaaaaggtgatggataatgttatcgaaaccatgtcatcgatttctgaaagtgcgaaaaagatctcagatattaatgacatcattaacagtattgccaatcaaaccaatattctctcattgaatgccgcggttgaagcggctagagcgggtgaacaaggtcgcggatttaccgttgttgcagccgaagtgcgtaacttagctagtcgtagtgcagaggcagccaaagagatcaatgaacttattacccattcggtaaataaagtacaggttggatcacaacaagtgagcgaagcaggacgctccatgtcggaaattgtgaccaccattagtcaagttaatgattttatgcaacagattgccttagcctctaatgaacaaagtatggggattaatcaaattgctatggccgtaagtgagatggataccgtgactcaacaaaatgcggcacttgtggaagagtctgccactattactgccaatatggatgacgaagctcatcagcttgccaacttagtctctcaatttaaagtggatgagaaagaaaatactaggcatgcataaaagggatagtttacgcttgataaaaatgtacctaagaagataaatatgttgttaattcattaaccaagacgaataagataaaacccctttagccactcaaaggtgactaacaggggttttttagagacttaggctttcacttcgttaggtgatgttatacctgcagcaacctctttaatattgtgcaatgtcgtttcactaatactaattaacgcttcttcagttaagaatgcttggtgcccggtaaacaatacgttatggcaagaggaaaggcgacggaacacgtcatcttgaataacatcatttgatttatcttcaaaaaataaatcgcgctcattttcgtagacatccatgcctaatgcgccaattttaccttgttttaaggcattaatggcagctgcagaatcaattaaggccccacggctagtgttgatgatcattacgccatctttcatttgcgaaaaagcactttcatttaataaatgatgattttctgcggttaatgggcaatgcaacgaaataacatgtgaatttgcgtaaagagtcgctaagtcaacatattccgcacccaaatctaatacagcttggtttggataaggatcataggccaatagcttcataccaaagccttttagtatgcgtaaagtcgctagaccaattttccccgtaccgataatccctgcagtgcgattatgcatattaaagccagttaagccttctaaggaaaagtttgcatcacgggtacgctggtaggctctgtgaatacgacgatttaacgagagcatcatcccaacagtatgctcagcaatcgcttctggggaataagccggcacacgcactacggtgatccctaattcggctgctgccttaaggtcaacattattaaaccccgcacaacgcagtgcaaggatacggatgttgagactggcaagctcttgtaataccgcacgattagcatcatcattaacaaagatacagactgcatctgcgccgacggcattttttgctgtttgttcagtcaaattaaagtcaaaatattcgatatcataatgatatccattatgctgattgacccattccatgtgtttgcggtcataatgtttagtactataggaaacaattttcatcctgtactcgcttattatcgattaaaatttattttgagagtgagaaaacaagaattatctaaccccaatagagaaacatttaatactattattataaacaatttaatgggtaaagtggatgttcggaatgtggttaatgtgatcaaaaggaaaatgaggtgttgttaaagaaaacaatcaaatggacagggatgatactactgggtgtcggcgcagttagcacgaccttgtggctcaccattccacgttggttacctgttgtggctaaaacctatttacctgaaggtgtttcactctctttaacacaacctaggttacaacaatggggtgtttttattgatgatatcgcattaaaaagtgatagctgtaccttggctaatgtgcagcaatttacgtttaactatcaaaaacagcaaattgatagcctatcatttaatagtcaacaacttactattaacgaagggtgtttttcacaattatcttttgcagataaaaaagagaccgcagcagttcctctcgatattcatgcgttattagctactattcctcgcttatcggttgatattaatcatgtttctttaatggataatcagcgctataacggccattttcagcttaaaagtgatacaaatgggcgattaatcagctatcagggagataatacgcagatacaagcgctgatccgtgataatcaatggttagatattaaacaattaaagattaatttacctgacgataatcagatagagctggcggctgaaatcgcgttaccccttaatgttgattcattaccagaaaatggttctatcagcacaacattgttaacatcccattatgcttacccattagtctttattgctcaatggcaggggaatagcggtactatttctattgctgaacaaggcggagggcaagcgttagctgtgttgccttggaatgtaactgcagaaaatatcacgatagaaaaagggcgttgggaatggtttgggcttgatcaacccttacgtggtggtgtgaatatcaacattgcccagtggcagcaaggattaacggggttacgcttaactgcgcgcttaaatgttatgacgcaagggcatgcagggaaagggaatttagtgatgacgatacctgaaacggcgattaactggttagatgctgatatacctattcaattgacaggcattgtaaataaagatctcatgcaagccagtgcacaacttcccgttaaagtgactggtatgttgacagatcctactatcgaatttcagcccggttcactattacgctttaaagggcaactaacagaaacgctgacggtaaaagatgctcgtttaccactggctggctcaacattatcttccaaaggatttaatggtcacctaaatgcgattgtgttagctgaagatactatttggggagattatcgggtccattttgctggacgttcgaccgatttcttacctgatcagggcaattggcaatggcgttattggggagagggcaatttattgccattaaaagcgcgttgggatatcgctggaactggctcttgggtagataacatggtgagttttgagacattaaataccggatttgatgttttaacttatcagcataccagtatgttagcccccagattgacgctcttaacgccatttcgttggttaagagacgataaaaacccattatttgaaggaaaattgaagttaaccagtcaacgaatcgattttcctgcggggggattcttagatagagctgactttattgccagtgtaaaaggtcaatctccttttcgttttaatatgaaaggcgagctcaatgccaagccaaatattggaccgataacgattaatacacgttgggatggtgaaaggctaagagggcagatgcgttggcctgcacaaccaatcaatgcctttcaatctttattgccagaaaaattaggcatcacattagataatggcgaattttatactcaagctgacttttctattgcccctcaacaaggtttagttgctggtggacatttagtagttaaacaaggcagcatgtggctaaaagatggcgtattagaaggactcgattttattttaccttggcgtttaaacggtgatgaatggcaactaggtgtaaagcagccagtgcaattacgcattaagcgcgtcaacaacttatttgaaatgacagatattaccgccgatctgcaaggattttaccctattacagaagcaaaacctttagttttatctaatgtcaaggttgccatgcttgatggcactatttctatggcaaaattagcattaccacagcatgaagcggcgattatctcattagataatctagagttaagtcggcttttcactttattgaaggtgacccaatttgccgcatcaggtaaagtaagtggcgaattacctttctttatcaataacaatcagtggatagtgaaagatgggtggctggctaattcatcgtacttaaccctcaggcttgataaagattttgttgactctattgatgatagcaatatgacagccggtgtcgctatggcatggttacgatatttagagattagccgctcttggacgcgggttaatttaagcaacctaggtgaattagtgcttgaagcggaaatccaagggaaaaatccattggaagacaaacggcgacaagtaaatcttaattatcgccatcaagaaaatatttttcagttatggcgcagcttgcgatttggttcgcaattggaagagtggttagaaaagagcctatccgatttagggagtgagtcagaatgatgttattatttttaaaaagactatttttatttgttattttcactatcggcatatcagcactcactggatgtattcgattagaggttgctaccccggaaaaaccgataaacattaatatgaacgttaagattgaacatgaaattaatgtcaaaatagatcgccaagttgaagacttgctgaaaaacaatagtgctatattctaacgctggggtgaataatgaattataaaaaatatctctttagttttgcattaatcacagcattgattagttcaaatgccgttgctttaacacttgatgaggcgcgcgcgcaaggcttagtaggggaaacttttagtggttatgttgagttagtgcaaccaaaccataagcaagctcaaatattggtgaatgaaatcaatcaagccagaaaagccaaatatgctgaaattgctaaaaccaatcaagtgactcctgaatctgttgcccgtttagcgggtgaaaaattagtggcaagagccaattcaggtgagtttgttaaaggaattaatgggcagtggattaagaaataatatccactacccaagtagcgataaaagagagactaaattattctcatagcgttgatatagtgataatacttattatcactacagtactctgttttctacacccgcaaattcattatcattttcaacaatctgatcttttgcttccacaatgaacgtaatacgagaagatatataccctggctttgcgcgaagattatcttttttgacataatttataaagaaattaaaataagcagtaccactttcatcaatagttttagtgaatgtatttttctgatttaaatcaataggattattttcatcatcaattaattggaatgtcacattatcacttgcttcagagcctgttacatcgttgataaggtaaccattattaaaatcaatatttgtattatcaatacgtaaagttattttagtattcttttctgaacaaagactaaaaactatagcaattcttttagaatatctgtcattagctaaggttcctgcataattgctagggaaagaatcaggacgtatacttctaactttagtgctattaggtatgtcaaagctacaacttattggcgctggtaaactacctcttctattatcagataaagcaataaaagggaagtatagtaatagtagaggaattaaaaatgttatatttattgatttcatagaaacaccttacataaatattcaagaataaaaattattcattattggcaataaatttgtttcttaataattgaattatttttactttcattttttacgttataatggaagaaacattgttgctcctctgtatctccccattttacttgtaccgttccgctttcttttattccggagaggaatattctattgtggtcatagacagaatcactagaaatgagattattattatcatcaaatgccattacattggcagcaaaaggaattggtgtatttgaggtaaataaaacattatagcccctatttatagggaaattgatttttgctaccgcacctaaagtaggtacgatgattttactttgagttttagtattactaaactcaggtaacgaatttatgtttagtccaatagtatttttacgatatggcatgatgtgcggtaatattaaattaccgttattgtctgtaatggcttgtgaagaacgattagttttaattccggcaatgccattcgtatttacaatagcaaaagtattacctaagtcaggtgccaaagttactccactttgatgtaacactattgcaccattaatccctaatcttaaattggttttattattagacgatttagttgtattaatagaataagattgatatctccccttatactgagtatttactgaagtatgatagccagcatttgggtggctaaaatcccgtcggtaattaatagaatagcctaagcgataatgttctaataaacttccacctatagtcgtactatttatataacctttattgtttggatgataatcaaattgattgcttacccaatgataggattgagagctatttgttagtggaatattaaaatttaaagaaaaatgattgtcattataatatttttcatttttatattgatattttatactataattcattttttttatagaagatgatagagaagtattgattgtaaagtcattttttcttttggcataagaattttgatgataaccaatagaaaatgtcccgaaagatttaatcggttgaaagagagaaattgtatagctattttttatgttgtctgtttgactttttctaatgctaacactatcagattttattgattgataatggctagaagatatatttaaagaagtaccaatattgctccatcgtttattatagcgcaactggtattttaatagattattgtgttcaaaataactaatatcactggctactcccccccagcgtcctaaatctaatgataatcctgaaaagaaagtattgctattcagcttctttctaattgcaccataagcggttattttttgattaataccataggagaactcacccagtaaaaaaatagggttattattttgattattaaactggttatatctatcataagaatatccagaaataaaattatattgataacgacctttttttaattggtttggcattgtagtaaagtaatgagtacttttttttatacgtccatctgcttcttttatttctaataccaattcattgctacctataacaggtagatcgtttaaaataaaaggcccaggaggaacaatagtttcataaatggttcttccttgttgtttcactttaatttcagcatgagattctgcaatctcttctatgataggactattcatatagagatcattaccagagagcaaattactagatataagttgaaatccaattaatttatctgttgataacattctactggttggtcgaaattcccccacattaagcgttgccaacagcgtatttaattgatgataagcatataatgagtatagcttaaattgctgttgcttatgcgtatgatgataataacttttactacgtactcgccaagcacctaagttagcacctgagttaaaactgattttgtgttctatcttattttgattgttatatttgccaaaataagaatatgagctaaacaaagcagggacaccatcatcccataaaacttggctagcaagcatattttttttattatctaaggctttttgtggaatagttaaatataatgattgcgaggagaaattatatttaaaatcaatattgtaatcgcttaataacaaatcagaacttaaatcaataggaatattataaaaagatggatcaatatttaaacgaattaaatcattaacattaatccttggtgttaatataccgtctttattttcataatataaaataatggtttcttttttattttcgttgatataaatatttgttgagtaataaccatcaggatgttcattatttaataacttgccgatggttttattatcaatatttgacaatacacttttatatagagaatgaatattattgttagcaatagaaaagaaagggtatgcatttaatatcaatagcaaagatgtttttagtctaaaacttatcttactcataaataagttcctttggggttgcaatgatagtctgctcatactcatcgactctcttccaatgtacttttttatctttaatatttttagttatttttttattttttatactgtaatttttaaatggcgatagggttattcgctcatttaatatatcaatgttatctacctttgcttctgctatggtaataaaataaggagtggggttgtttattttaataaaattttcatcattaataaaaaaattaatatctttattatcacttttgttaataatattgctaggtgtatagaaaagattatatattgagtttaaagagataaggagcaggtttttatcagccatctcatcatctataactggaactaattttatatttactctatatacagattcttggttgatttcttttatatcatccgttttgataatttttaatgtaaaattttcattgggtgctaatcttattaaactaggagaaatgataaatggtgcctcactattatcttctttgttatagtgtgatacccaactttgaataatataggttttttgttcgcttttatttcttatgtcaaatagaatttccttatcttgttctttataaaaaaatctatccttattaatttgaatagaagcataacatgagaatgtaaagacaaatgatattatataaacaatatattttttaatcatatgttttttaattaaccattagttaagttatttattatattaatccataaataaaaagccggtatttccccggctttatattgggttaaaaattaaagcagaattatatttaattttggccttttttattggatatcatcagtgacgtaagcatcaagagataaggctgcattgaaagcacctgcggtaacagcatcatcaatcgattctggtctatcatattttaataaaaattctaagctaccacgttcaccggcaacctccgaagaaaatgtacgttgttctcgctcaccattaagtggaacaagttcacctgtagaacgcaataatgctactcgagcattggtatcattttctgtcgaacctgtattcattaaatgagtagcgttttgttgtccaacaactactttgacttttctatctcttgcttgattagtacagccagaaaaatccacactaaatcgtttttcaggagtaagtagtaaagaatcaacgtaagcatcatccaattgaattggagcaatatcttgaacgacacaagttagtttctcgtcaattactctgccttggatatctatattataaccaccaaggtgaatctgttgtgcaatagcttgtgttgataaagaaagtgtagatagaattaatagtgaaaataatgattttttcattttaaagtccatttaagtattaattgtagttacaaatttgctcataattaagagcgagataataatatttttttacgtgaaatttgacaagttatatataattatgattagtattattttgttaaatgattagcgaaatatgtttttttgggttggtttgttagatttaaattttaaattataggtaaaagatgaaggatttatctattgagggttttttttaaaaaaaacagaggttttatttgtgtaattatatttataaataaatagcaccttgattaaaggtgccattagatatatttttattttatcattatttctttattgataattaaatttatttatttttgtgcttgaacatgtgactgttgtgcatattcttcgcctagcgcagtatcctcggtgagaataaactgtacattattaataccaataaatgataaaaattgtgttagatatggaataattaaatcagagggttgtcctttatggatcccaccacgactcgttaatacaataacttgcttatcttcaagtaatccgactgaccctgtttcagtatatttaaaagtttcgcctgcacgcgcaataaaatcaatagaatgttttaactgagagaagatggagaaattatatatagccgtatctttgccaaaatcaaataatatggcttgatctaaaacgggaatgggatcttttgccagatcacgtagggtaatgaggtcattttgatggtgtttttgccaaattttaatcttatgttttttaattaatcattagttaagttatttattgtattaacctataaataaaaagccggtatttccccgactttttattgggttgaaaattaaagcagaattatatttagttttggctgtttttattggatattatcagtgatgtaagcatcaagagataaggtagccttgaaagcacctgcggtaacagcatcaatcgattcaggtctatcatattttaatgaaaatactaatctaccactatcaccggcaacatccgaataaaatgtacgttgttctcgctcaccattaagtggaacaagttcacctgtagaacccaataatgctactcgagcattggtatcatttgctgtcgaactagtattcattaaatgagtagtgttttgtcgtgcaacaactattttgacttttcttgctctttcttgattagtacagccagaaaaatccacactaaattgtttttcaggagtaagcagtaaagaatcaacgtaagcatcatccaattgaattggagcaacatcttgaacgacacaagttagtttctcgtcaattactctgccttggatatctatattataaccaccaaggtgaatctgttgtgcaatagcttgtgttgataaagcaagtgtagatagaattaatagtgaaaataatgattttttcattttaaagtccatttaagtattaattgtagttacaaatttgctcataattaagagcgagataataatatttatttacgtgaagcttgacaacttatatgtaattacaataaatatttatttattaaataattaggagtagatactttatatggtgggtaagctagatttaaatatcaaagtatgggtaaatagtgaagtatttatctgttgagttttttttaaaaaaaaacagaggttttttttgtgtaattatatttataaataaatagcaccttagttaaaggtgccattagatatatttttattttatcattatttctttattaattattaaatctatttctttttgtgcttgagcatgtgactgctgggcatattcttcgcctagcgcagtaccctcggtgagaataaactgtacattattaataccaataaatgataaaaattgtgttagatatggaataattaaatcagagggttgtcctttatggatcccaccacgactcgttaatacaataacttgcttatctgcaagtaatccgactgaccctgtttcagtatatttaaaagtttcgcctgcacgcgcaataaaatcgatatagtgttttaattgagaagggatggagaaattatacataggcgccgtgatcacaataatatcatgtgcttttaattcattaattaatgtatcagagagtgctctagcggctttttgttgttccgataacatagccgtatctttgccaaaagcaaataatgtggcttgatctaaaacaggaatgggatcttttgccagatcacgtagggtaatgagatcattttgatgatgcttttgccaattttctattagatagtcagccattttattgctgtgcgagtaattttctaaaatactggattttagtacaagaagcttgttcattttattctctcggtaaatatctgttatgtttatatagaccaaattttatcttatctgaaaaatttcacaccataatcgtttgaatatgctattcaaatttattgattatatatattcatagaataagaaaattcatcaaccctttatgtgcaaattggctgttgtgatatcatggcaacaatattatttggttaaataaacctcaaaaaggataacaaaaggtggcactatcatctgcgatgctctacaaagagatagagcaactctcgttgcgggatcagcaacgattgagaaaacgcttacgtggcgttgataaaataagtaaagaaacgtcgaaacacgcggtattaagcgagattgagcaggatattattgttgcaaaacagcgtatattaaatcgacaagctcactgtcctaaaattgtttatccagaaaacttgcctgttagccagaaaaaagaggctatctacaatgcaatcaaagataaccaagtggttattattgcaggggaaacgggatcgggtaaaacaactcagatcccgaaaatttgtctcgaattagggcgaggcgtaaaaggttatattgggcatacgcagcctcgacgtttagctgcacgctctgtcgcagagcgaattgctcatgaattaaacacaacattaggtgagtctgtcggttataaagttcgttttagtgatcatgttggtgataacacgctagttaagttaatgactgacgggattttattagctgaactacaacaagataagctgttattacaatatgatactattattatcgatgaagcccatgaacgtagcttaaatattgactttattcttggttatttaaagcagcttttacccaaacgcccagatttaaaagtgattattacttctgccactatcgatcctgagcgtttctctaagcattttaatcaagctcctattattgaggtatctggccgaacttatccggtcgaagtgcgctatcgtcctattggtggtgatgctttggatagtgataaggatatgactgagggcattattgatgcaattgacgagttaagtcgagaaagtgcgggtgatattcttatttttatgagcggtgagcgcgagataagggataccgcagaggcattaaataaattacaactacgtcataccgaagttttaccactatttgctcgtctttctaatagtgaacaaaaccggatatttcagcctcataccggaagacgcatcatattggcaaccaatgttgccgaaacctctcttacggtaccgggcattaaatatgtgattgatacgggttatgcacgtattagtcgatatagttatcgaaccaaagttcagcgcttacccatagagcctatctctcaagcttctgcggatcagagaaaagggcgttgcggtcgtgtttctgatggtatttgtattcgtctttattctgaagatgattttatttcccgtgcgcaatttaccgatcctgaaatactaagaaccaatcttgcttcggttattttacaaatgacctcgataggattaggggatattagcggatttccttttgtacaagcgcccgataaacgcaatatacaagatggtgtacgcttattagaagagctgggtgccttacaagagggtactgataataaaggtgcttatcgtttgacgccgatggggaaacaattagctcagcttcctatcgatccaagattagcgagaatggttcttgaagcacgcaaatatggtgcagttagagaattaatggtgatcacatcggcgctttctattcaagatcctcgtgaaagaccgatggacaagcaacaagcatcagatgaaaaacatcgtcgtttccaagataaagattcagattttctttcattactcaatttatgggactatttaaaaactcagcagaaagagttgagtcactctcagtttcggaaacactgtcgccaagagtttttaaactttatgcgagttagggaatggcaagatgtctatacgcaactacgccaagttgtgaaggaattaggttttccaattaatagccaaccggccgattttaaaagtattcatgtggctttattaagtgggctattatcacatatcggacaaaaagatagcgataagcaagagtttactggcgcgagaaatgcgcgttttgctatttatcccggctctgggttatttaaaaaaccgccaaaatggaccatggtggcagaattagtcgaaacatcacggttatgggggcgcattgctgcacgcattgaagcggaatggattgaacctatcgcgacccacttagttaaatatcactatagtgagcctcattggtcaaaagcacagggtgcggtaatggctaatgaaaaagtcaccttatatggtttacctattgtggcctcacgattagtaaattatggcaaaattgatccactattatgtcgagagttatttattcgccatgcgttggtagagggcgattggcaaactcggcatgcttttttccgtgaaaatttaaaattacgtaccgaggttgaagagctagagcataaatcacgtcgtcgcgatattttagtagatgatgaaacgctgtttacattctacgatcaacgaataccacaagatgttatctctacccgccattttgataaatggtggaaaatagcgcaaaagaattcacctgatttgctgagctttgaaaaaagcatgcttatcaaagaagatgctaaacgtgttagtgcattagattatccaaattattggcatcaagataatttaaaattacgcttaacttatcagtttgagccaggtacagcagcagatggcgtcactgtccatattccattaccgattttaaatcaggttaaagatgaaggttttgattggcaaattccgggtattcgtcatgaattagtcgttgccttaataaaatcattacctaaacctatacgtcgtaattttgttcctgcgcctaactacgcttcagcttttttagaacgagtggttacccctgaaggtgaattactcgataaattaggaaaagagctacgtagaatgaccggcgttacggtcgaacgtgatagttggcaacttgagcaagtggccgatcacttaaaaatgacttttcgagttgttggtgacaacaataaaacccttgcggaaggaaaagatcttaatcagttaaaagcacgtttaaaggacaaagttcaagaaacattatcagcggtagcagatgatggtattgagcagcaagatttacatatttggagttttggtgacttgccacaacgctacgaacaaaagcgtggtagctattcagttaaagcctatccggcattagtggatgaaaagaatagtgttggtatcaagctatttgaaacagaaacagagcaacaagcggcaatgtggcaggggataagacggttattactacttaatattccttcacccattaaatacttgcatgaaaaattgcctaataaagcaaaattaggtctttattttaatccttatggcaaggtgctagatctgattgatgactgtatcgcttgtggggttgataaactcattgcttcttatgggggattaatatggcaagaagagcaataccaaaaattccaagattatgtccgtgctgaattaaacgatgttgttgtcgaaattgctaaacaagttgagtctattttaactcaagtatttgcgattaataaacgcttaaaagggcgggttgatattagtgtcgcttttgcattatctgatattaaagcacaacttaatcaattagttttccccggatttgtcacatcccatggctggaaacgtcttgcggatattcctcgctatctcagtgccattgaaaaacgtatggagaaattagcgattgatcctaaccgtgatagagcacaaatgagccgagttgaaaatgtcattttgcagtggcaacagtggttagctaagttaaccgagaagcaaaaacaacaagaagaggtacaaaatattcgttggatgatagaggaattaagagtgagtttatttgctcaacagataggaacgccttatcccatctctgataaacgcatcttacaagctattgagtctatctcattaagttaaagctgatagataaacccacaatggtgagttatggccattgtgggtttatatactactattattgataatgtactgaaatggtaaattgatcattaatattgtcagctaaaaccactttattactgtctaagataaaagatgttattgcgctattttttattgaaatggcagtgttctttttaatattcaatattctattagcgttttttattattgatggacaatttgatatcttcaatataacttcttggttctcttttgatttattatcatccattatgtattcacagctagtttcatagatataataagcatttacagaaaacacaggtagtaatattaataacatgataataggagttaaatgttttttcataggggaaataaattatttatattctaagtttacattaatttgtgatgttaccttgccaggcaagatgttttcactcattttcacataacctactgaaaaaggaaaagtatattccgtcgaaggtgttctatgaacgctattataaataacattacctaaataatatttattatcattatatttaattgataaacctaccccagaaggggtgccattattaagaagtgttaataaattagtatttctacttttataaatagcaggtgcatcaagctttaatgaaactaatgtatcttggttacaaataacaccaatagaaaaatgtgtttcattagcgggtattgaatcacttaaactgtttttttctacaggcgctaattcaatattaggttgttcaatattaagttcgcaaactttattctgaggcttctcaataatcaaattattataagtaaattttttattatctaatgtataaacaagaaaatcatccataacaaatatgtcgctcagaggttctagaacgatttcgcttatttttattaattgaatatatagtcttggccaactatcagtacaatatatatttttatatccttcttttctagtttgagcattacagacatttgcatattcaggtgttacattaaattcatcgcctactaagttaaaaggtgttttattcgctgatatcttaaagccaactcctggaatatttgttttaaaaatatcatctttataatgccttgcattaataattaattttagatcaactttatctttacaatgaagaattgacgtagatagagcggcatcagtaaaactcatttctgcgataggttggccaatatcgacacctaaatcaatatcactagctttaaatctaatattatgtactggaataaacccattgtctgttatatcgtcataaacgcaattgttactaaagcttttatatggttcatcagaataacaatggaatgagagtaaataaattaaaataataatgtatttcatttttatatattattcctctttaatgcaatttacagttttaaaataaattctattttgtttttcattatcatttaattgatagttaaatgagcactgttgtttgttggaacttccccattttacaaaaatctttcctgaaataggtaaattagaaatatataatttattatcttcatttacataggatatatcggatagggtgccatcagaatttttcacataggctgttgcaccaaaaggaatgttttggtgaaatgtaaataaagcactttctcctttagttaccttaatattttttgcaataatagctcctttagtaggaattaaatgatagctataattatcaatattataattataatctaatgattttgcatcaatgtggaacttattgttatgataactagttaaattaggaatgattaaataacctcttcggtctgattctattgttggctttcctattatttttactttcttagcacctgcaaaatttaggatagcaaaactatcatttagatcttgggctaacgttattcctccattatgaaacacaatgccgccattgagtccatagcctaaagaataactatctttattaaatcgagagtttatatttagtttggctatcctacttaaataattaattttcattgatgaatctaagcgttctttattatttttagaaaaatcaaggttataatttaaccgattattttctaatgtatttccactaaatgaaatattctcatgaaaatatttttctctattatcataattgatccttgctgttgcccaatgagagagatcttgaccaatagggtaatttaaaaaaattgataattgattattattgctatactgatctttgctattctctagctctaatgaataggaaagttttttataatttgaactagtattaataaaaagtcgttggcttttttcttttgagtgataataggttgcaatattataccccaacgttaaagcaatattattatttaatgattgtgaaaagtgaaatcctaaatcatatttcttatattctttatttacagcataattctctttaaatctaaagtagaatgatgagtttaatgaaatagttgtattttccatagaaaatactttttggtaattaatcttattggactgatattgttgatgatatttctctcttatccaagcgttttctaatgagactatacccaggatatttaatcctagggtatttccaataagtgctttaatatcatctccttttttttcagctcctatcattgtcgttaaataattgctcactccatagcttaaattcaattgagttaatagttcttttttcttattagaaggaaactgtcttttttgaggattgtttactaaacccatagtatagtaataattccattggttctttcttaataaatactgtgaagaataattccagattttcttctttcttacttcgccattttcttcttttataattaatactaattcaccatttgtacctaaagagggaaggttattaagagtaaatggcccaggtggtacagatgtgctatatagtgtttctccattttgctcaatgctaacttctgcataggtataggcggtttcacttataatgggtgcataacctactagggagccatctttcattgcattatcgctattgatttgcacgcctagtattttataagtgtttaagttaggagaataagcatagaaatcacccatagttaaaatggaattaatatttctaagtgtcctatatacatattgctggtttatagaaaaagaattattattattatagtttagatcttgacgataacgccatgcaaataaattaattccattatatagctgtaggttatgtatgtgttgtccatttaaactattttgtttataataatggccttgatagttgtatttaatgaaagcagcattatcaccatcatccaatttttctttggaatatgaagtgtttttttctatcgcaattaatggtactttaaagtaaatcgactgtttgttaatttctaattttatattaaataatttttttaataaatcatagtcaacgatatcgttgtctaacttattttttaaaggctcgtaataattggtgtttattccccattgttttaaatcaaatagagttattattggagttaagttattgtttttgtttttaaatgatatctcagaattttgttttttattgttatttatataaattgttatgttataggttccttcgagaaaattttcattaagcaagagtgaaaaatcaatatttccattgtggttttcaattgcttgtaagtaaagtgcatttgcatatacatagggcgtaaataataagagtaaagaaataggagataactttatcataattaatactattcgctattttttatgttgatattaacttcattaccaaaatcatttatatagctccagcctactttagctgtaccaaaatgattttttcctatattaatttcactaaaaggggatagcatgactgagatctcttttttttccccattagaaaaaatatttataatagtgaagtagtattcagagttgttttttattatcatttcttttttattatttatagaaaaaataattttttttgtcgcttcttcaactgtttctgttaagccatgtggtcggtaaaataatttaaacactgacttaattgatatatgaatactattatgttttgattcagctatagggatcgctttgctatttatataaaaaagactttcacgatctgtttgagctattgatgtgattttggcaattcgcaaaattgcagattgttctttatttaatttaaataaaggtggggtaatcataaaaggtgtatttttatcattttcatcctttgtgatccagctttgtattaaataatcagtagcggagtttttattttttatattaataataatatcattatcgtcttcattatagataaaccgtgttccactataaattacatttgcttgtgtaaaaaaagtagaacacagaattatgataaataaaatataaacattatacttcataataaaataatcctgtgttttttttaattaagaatatttaacggtaaaatttactgatgtattgacagttcctgatgttggatttggaagataactcgcgtaattggcatggaatttataagttgctgttttattttcaattctcttagttattgcttggttaccatttaaatgaataatatttttattaccttcatcactacgaatgaaaattcctactcctttagcgctattatttgtgatgcttttattcttcataattttattttcaccggctaaatcagtgccgttaaatgttaatgttgcattattattgccacaatctaatagtttaatttcaaaattactacctgtactgcttttggcattggcccaatctttatctaagactatttccgatttattaattgtaggcaaagtgataggagaactagggctatctatattgcaggatgttgatattactgttccactaaaattaataatattgttatttttcttttctgttgttttgctattatctgctaatacattcatgctagaagagataactaataatgcagatagtaatctgatatgattttttattttcatcgtttttcctttaataaataatttgataacgcaataggtttatcctatttgttgcgacggagtggataatatagttttctaacaaaaagtaaataaagtgtatttatctgctttttgttggaaaatcagtttatctgtctgtatattatactatacatggaggcattaactaaaaataatatattttattgtgttattcactggttttttaaaaaacatcatataaaaaatgaattttatataaaaattatatgggtaaattgtagtcaattagggaaataattagttacaacatacaatttatccctctaatataatgcacctaaccatcatcaataatatttatttgctaagtaaccaaaacatggcgttattcaatttctaatgacaaagcttaaggaaatgaacaagagaagcttgggtagaaaaaaagggagtgaagggaaagagatgcccccttgcttctttctcaagggggaatatagatcttaattaaatactaaatagccacaagcaggaattgcgccaattaataccatcatcagtagtattttttcactagtatttaatgactgtttatctttatattgttttcgtgaatataaaaatattaatacaccgggtgcatagagaacgacggaaagtaataaattaattacacctgatgcataaagtaaccataaaccatagaggcttgcaggtattgctatcagtaataatcctcggctactgcgttctatggcaactttaaataagaaagcaccaaccaggaaataaggaacgaggatcatttctgacgcgatggtcagtagggtattgtaattactaccagtaagccaaattaatactagtgataattgaacagctaaattagtaaaccacaaggaagaggaaggcgcatcattgtgattttgtttactcagttgtttgggaaaagagtggtgtaatgcggcaatataagggacttcagcagccataattgtccagcttaaataagcgccacataccgatagaataaggccggcggcaataactatctcacctatatttccaattagttgaaccagcaaaggtgccatagatgggtttttcatcatagcaagctctgattggctaactaatccttgagataatagggtaacgagaatataaataatcagcgcgatcacaaccgcaaatattgtcgctaaaccaacatctcttctattttttgctcttgcagatacgacaacggccccttcaataccaataaatacccataaagtaattaacatggtattttttacttgttcccaaacgggcacgcccatttttatcccttcgaaatcaaaggtaaaaatatccatattaaaggcaagtagggcaacaataataaataaccccaatggtattaattttgccatcgtggccattaaattgatactagcggctgtttgtacacctcgtagaactaaaaagtgcacaacccaaagtaagattgattcacccaacaatgcctgccatgtattaccatcaccaaaaataatattattagggctgtcggtaaaaaaactcacagcagcgaaaacgatgactaaataagagacattggcaactaccgcacagacccaatagccccaagcagaacaaaagccaataaattcaccaaatccttctttcgcataggtaaaaataccgccatcaagatcaggtcttaagcgagaaagcaataacaatgatagggcgagaaaaaggatgccaacccctgttattatccaaccgataatcagtgccgcagggcttgcaacctcagccatattctgaggcaaactgaatacacctgcaccaaccattgagcttagcactaacgctgttagtgacattaaaccaagttttttattcaaagataagttcctgcatgattaaaattgtgaataaatagcgtattttcttgtttttggtttaataattagcataaatatgaatctgttaatttaagacaaagataaaaccactaaaaaacagcgagattttacggagagttgacttggttgtctatgcataaaatcataaattttatgcataaggataagaaattgagtgaggttatttggacaagtataaaaaaaccttgcatagagcaaggtttttaaaagagaaagtaacaacagattatttaaataaatcagcggtgattgttaccgtaccaccattactctgccattcacgagtaatatggtagtattttgcacctttctctgcggcacgtttagcaacttgataagaaacttccggtgagttcacaaaataaccactgaaagtaatggtatcaaaaggttccattaatgcagccgctgctttattaacctcttgaatttcagtgccatcaggtaaggtgacagtgtaacgtccgcttttacctgatgattgtgtttcagcaaatacacctacatttctatcaaagtcactatttgacgcaagtcctggtttttcaactttattggctgcacttccaccttcggcaataagcgctcgacccgcatcagagtcataaggaaccacggcttctgaagactgtatggctcttttaggggcatcttttttatagatataagcagtaacttcttggttaccaccatcatttaccgaaatattacggacaataaagaatgatgctgcacctttttttgctgcttctttcccgatttcgttattaatatcaggtgttgttggatagtaaccatgaatagtaacggtatcaaaaggctgtagcaaaatagcttcaggttttggtaattcttttacaccatgaaatacgcggtattcttcttcagttgcttttggtgcatcttttcgatacagatcggcagtcacactcatgttgccactatcactgatatcatctagaccttgaatgtaaaaactatcagcaccgattttatcagcacgacgagatactgcgtcagctgcttcataaatcgcattaaaacgaccgatgactgtaattctttcaaatggttttagctctgccgcttgttctggagacagttcctgtgcagcctgcgcaacagtaatattagttaaagataacaccgctgctgcgatgactgaggttttcagcttcatacaaaatccttccgccttgcgcaattaatattggtcatgtgctgaacatagtgatctatcacatagagtgcaattattacatgtaataatagcgtttgtcgcattattttatttagtgaatagccactgggtcaaatgaccagtatatgttaccagatatttacttaaatatagtgaataattcattaatatgccttttcgactaaaatgatcgcattaagttcaattttagctttacacagatctagattattggttttattttcagtaggttattagtaccccaataaatggcatgtgaatgataatgcttaacaatttttttgcatattaatgaaattagccatgaaatattaacagttttcggatggataagaagggaaaattatgcgaattggtatacccaaagagcgactttctaacgaaacaagagttgcagcaacacctgctacagtcacacaactcttgaaattaggatttacagtcgcgatagaaaatgaagctggcattgcttctagtttcgataatgacgcttatcaacaagcaggggctgagatcttagattgtcaaaatatttggcaatccgacattatcttaaaagttaatgcccccctagaagatgaaattgctttactaaaaaaaggctcgactttaattagttttatctggcccgcacaaaatgcaccattgctagaaaaattagctgaaaaagagattaatgtaatggctatggatagtgtaccacgtatctcccgtgcacaatctttagatgcattaagttcaatggcgaacattgccggctatcgtgcggtagttgaagccgctcatgaatttggccgtttctttactgggcaaattaccgctgcaggtaaagtaccaccagccaaagtgatggtgattggtgcgggtgtcgctgggcttgccgctattggggccgcaggtagtttaggcgctgttgttcgtgcatttgacactcgacctgaagtcaaagagcaagtgcaaagtatgggcgctgagttcctagagctggattttaaagaagaagcggggagtggtgatggctatgctaaagtgatgtcaaaagcatttattgatgcagaaatggcattatttgcagagcaagccaaagatgttgatatcattattaccacagcattaattccaggaaaacctgcaccacgtttaatcactaaagagatggttgattcaatgaaaccaggtagcgtggtggtcgatttggcagcccaaaatggtggtaactgtgaatataccgttcctggtgagatttttaccactgaacatggtgtgaaaattattggttataccgatttagccgcccggttaccggctcaatcatctcaactttatggtactaacttagttaacctattgaaattactctgtaaagaaaaagatggtaatatcaatattgattttgacgatgtggttattcgtggtgttaccgttattaaagcaggggaagtgacatggccggcgcctcctattcaagtttcagcgcaacctaaagcagctcctgcagcaaaaccccaagaaaaacccgttgcgaaacctatttccccgtggaaaaaatatggtttattggctattgcctttttactgttcgcatggttggctaatgttgcgccaaaagagttcttatcacactttactgtcttcgcactttcttgtgttgttggttattacgttgtttggaatgtcagccattcattgcacaccccattaatgtcggtgacaaatgccatttcaggtatcattgtcgttggtgcattactacaaattggtagtggtggttgggtaagctttttctcatttatcgctattttaattgccagtattaatatttttggtggatttaccgtcactcaacgtatgttgaaaatgttccgtaaaggataagggagacaattatgtccagcggtgttgttacagcggcatatattgtcgccgcaatattatttatttttagccttgcagggttatccaaacatgaaacctcaaaacaggggaattactttggtattgcagggatggctatcgcgttatttgcgactatctttgggccttatgctgataatgtaggttggatcattgttgctatggttattggtgccgttattggtatccgtttagccaaaaaagttgaaatgacgcaaatgccagagttagtggctattttgcatagttttgtaggtttagccgcggttctggttggttttaatagttatctagatcacaatcctgccattgatcctgtaatggccaacattcatctcacagaagtctttttaggtatctttatcggtgcggttacttttaccggctccattgtcgcttatggcaagctaagtggcaaaatgtcatccaaacctatgatgttgcctaatcgccataaacttaatttagcggctttagttatttcatttttattaatgatctggtttgtcaaaactgacagtgttggtttacaagtctttttaatgattgtgatgacagtcattgcattagcatttggttggcatttagttgcctccattggtggtgcggatatgcctgttgttgtgtcaatgttgaactcttattcgggttgggccgccgccgccgctggttttatgttaagcaacgatttgttaattgtaacaggggcattagtgggttcatcgggcgctattctttcttatatcatgtgtaaagcaatgaaccgctcatttattagcgttattgccggtggttttggtacagatggtagcagctccagtgacgaaggagagatgggggaatatcgtgaaacaaccgcagaagaagttgctgaactattgaaaaactcaacttcagtgattattacgccgggttatggcttagcagtggcacaagcacaatacccagtacatgatataacagaaaagcttcgtcagcgtggtataaaagtacgctttggtattcacccagttgcgggtcgtctaccggggcatatgaatgtattgttagcagaagcgaaagtaccttacgatattgtcttagaaatggatgaaatcaatgatgattttgctgatacagataccgttttagttattggtgcaaatgatactgttaacccagccgcacaagacgatcctaatagtccaatagcaggtatgccggtattagaggtatggaaagctcaaaacgtgatcgtgtttaaacgctctatgaatactggctatgcgggggtacaaaatccattattctttaaagaaaatacccaaatgttatttggtgatgctaaagccagtgtcgatgcgattttaaaagccttgtgatctgtttagctaataatctttaataaaaaacgcccgactatttaagtgatagcgggcgttttgttatacagtattaaaagcgttattcgttgtctgaatcgacagtgataggacaggtaaagccatcaggtttgatagcgagtaaatcacattttatatggtcgatcagctgttctgctgtattgcctaagaaagcggcagaaagtccagttctccctaaaatacctaatacgacaatacccgcatttagctcttcgcatacttgagggataacttgctcaggcaatccttctttgacatgtgttttttcctcaggaatagagaatttctggcgaagctctttcatcgctataaggtgttgtccacgcaaagcattgttataaaggttaggatcaaagtcaggtaactcaattgcaatattaatgggtgcaacagggtaggcactgagtaaatgaacgtcgggatctttttgtatacggtgagataaatcgtttgttaattcaattaactttaaatttaatgcatcatgatatgactcttcattggacagattagcggcgacaacaatagtgccgtattctggccactctttatcttttaccatccatacaggagcagggcattttcttaacaattgccaatctaggggagtaaaaattaaggagcctaacttatcatgttgatgagccattttaatcagtaagtcatgcttatcggtgatcacttcttcaataatggcttcatacggtcggttatgccaaatcacttttatgtcgatttgaatgccggcttcaagataatagcgagcttgctgttttatccaagcggttttttgattaatcacgcctttgcgcatcgcattacgttcatcgggagataaaagggtggtcatgtcatatgagagatcataaacaggtagaaaagcttttatccgcccaccattacgctgaacgatataaacagcacgacgtagtgctggttggtcatcttggttaggatcaatgacaacgagaaggttttgatatttttccattgctatatcctctttagggctggatttatccatctacatttttaaagataacccaagaagctaaaatgcaatagcacaaaatagaaaacgggacacaaatttgtgtgccccgttataaaaataggtgatgtaatgtaaaagattaagcttctgttgaggaaggcagtttgcctgcgagttcacttaacatttcactatcttcaatagtgatgtatttaccttttacacttaacataccacttttctggaaacgacctaatagtcggctaatggtttctactgtcaggcctaagtaattaccaatatcaccacgagtcatggttaaacggaactcacgaggtgaaaaaccgcgctgcgcaaagcggcgagagaggttataaataaaggcggctaaacgttcttctgcatttttctttgatagcagtaagatcatctcttggtcacctttgatttcgccactcattagacgcatcatttgttgacgtaaattaggcattttgcctgataaatcatctagtgtttcaaatggtatttcacaaaccattgatgtttcaagagcttgtgcaaagcttgggtgttcggtgttgataatggcatcaaatccaaccaagtcacctgcaagatgaaaacctgtgatctgttcgtcgccttcttcagtgatcgtataacttttaatagttcctgaacgaatggcataaagtgacttcagctcatcaccggctttaaacaaggtttgacctttctggataggttttttacgctcgataatattatccagttgatcaagctcatgctcgtttaaagtaaacgggatgcagagctggctaatactgcaatcttgacaatggattgcacaaccgccagattggattcggcgaacgacgcgtttttctgggatcataagcttgctcattacaaataaaaatattgatatgtgtcaattttaacacacattgctgtaattggtaaggggaataatggtacgcatagaaataattctgaatgtaaaaaacgatatagattgattaagcccgtgttttgtttggtgacttatttagaataatttgcgctaaccctatacacgattggtatattattcgattttttaaggaagtcatagggtatttgctaaattatctttggtaaaactaaaaattaggagggaactcaagaaattttattcaaggattaacatcttattcactttattttcttaacttttcgttttgccaacagaaattaatcatctgttaacacttcctaagtaaagttagctaaatgtatttttgatacaacttaatgctaacttgaattagcttttccttataaaatggcagatcccatacaaagacgaatggagttttgaaacattcgcttacctattaagtggtattgatatgtatcaataagggttatccactatcttttatcattttcattaataaaaatagttatgtgagaatgatatgtctataaaaaaacaagaaaaaaggcttgctaatcaagaggggatgccattaacgcgtcgtcattttgtacaagccagtgcagcattagtgagtatgccttttttcgcacaaaatgcacaggccaatcttgataaaagcctacctattgccaacattgatgagaaacctgctactgtcgtcgcaacatgcagcacctttgactgtggtggtaaatgtgatatccgagctcatgttaaagagggaattgttacccgtattaccacaagaccagatgctgatttagatgaacaaatgccgataatgagagcctgcgtaagaggtagaggttatcgtaaattcacttatcatgcggatagacttaaatatcccatgaaacgtgtgggtaagcgcggtgaaggcaaatttgagcgtatctcttgggatgaagcaacctctttaattgctgagaatgtaacacgattaactcaacagcatggtgcagcaagtcgttttcttacggtaaataccgccgtcactggggggatcttctctggtgatactatgatgaaaaaactctttaatctcacaggaggatatcttccttattatcactcagtgagcttagggaataccgctaaagtcacaccttatacttatggcgtatctaaaacaggaagttctcttgatactttagcggatacgcctttagttattttgtggggacataatcccaacgaaaccatttttggtcacaccaatcactattttcaaaaaatgaaaaataatgggaccaaatttattgttgtcgatcctcgttattcagatacagcccaatctttagctgatcaatggatcccattacttcctaccacagataatgcactgatggatgcaatgatgtatgtcattgtgaccgaaaatttacatgataaagcgtttatcgataaatatgtgctaggttttgatgaagatcatatgcctgaaggggtgccagctaacgaatcattaatggcttatttattagggaaaaaagacggtatagcgaaaaccccagaatgggcgacaaaaatcacacgagtcccagccaatactatccgtcaattagcacgtgaatatgcgatgacaaaacccgcggccttaattcaaggttgggggccacaacgtcatatttgtggtgaacgtaccgcccgtggttcaacgttattagcagcaattactgggaatgtgggtaaaaaaggcgcttgggcggctggatatggcggaattggtaaccgtcaatctattcgtggtcctaatattggcaaaaatccggtaactgcacaaatatccattatgaattggatgcaagctgttgaggatgcgagcaaagtgacgccagaagatggccttattggcgtcgataaacttgatagtaatatcaaaatgatcttttctttagcgggtaactatcttgtcaatcaaaaccctgatgttaatgcggcagctaagttacttgaagatgaatctaaagtagagtttatcgttgttagtgatctatatatgtctccgtcagccaaatacgcagacttagttttaccagaaacgagctttttagagcgttggaatatcggtaatacatggggaacgggcaactatttcttactgtcagaaaaagtcgttgaacctgcttttgaaagacgttctgattatgaatggatcagcgatgttgctgagaaaatgggagtcaaagaggcttttaccgaaggacgaacagaaaaagagtggatagcttatctcgttaatactaacaaagaacgctttaaagatagacctgatttcccaacttttgatgaattactcaagactcgccgctatcttttcaaagatgcaccttttgttgcatttgaagaaaatattcgtgatccagaaaatcatcctttcccaactccatcaggaaaaattgaaattttctctaaacgtctctatgacatgaataatgtcgatattcctgcattatctcattatgttcctgcaattgaaggtccagaagataaattgaccgagaaatatccactacaaatgttaacttggaaaggaaaaaatagagctaattcaacgcaatatgctaacccttggttacaagaggtacaacgccaagaaatgtggataaaccctattgatgcacaaaatagaggcatcaaaaatggcgatatggtgcgtatctataacgacagagggatcacccaaatacccgctttagttaccgagcgaattattcctggtgtggttggtttacaggcgggggcttggtggtctcctgataaagacggtgttgatcatggtgggtgccctaacgttttgacatcaacacgtatgacaccattagcccatggtaattcacatttaaccgttttagttgaggtaaccaaagcatgagtgaattcaaacaatatgcgcctgttagcgatgaacagcttggtttttttattgattcttctcgttgctcaggttgtaaagcatgccaagttgcatgtaaagataaaaataatttagaggttgggcgccgttttcgccgtatttatgaaatacagggcgggggatttgcgcctaatgggcaaggtgcatttgaaaataatgtctttgcatacacattaacgatttcatgtaatcactgtaacgatcctatatgtgtaaaaaactgtccaacaacagcaatgcataaacgccccggggatggcattgtccgtgttgataccagcaaatgtgttgggtgtggttattgctcatggtcatgtccttatggtgcaccacaaatgaatactgaaacgggacaaatgtcgaaatgtgatttctgcgtagatttattagcagaaggtaaaaatcctatttgtgttgatacatgtccattaaatgcgattaagtttggaaaaattaaagatctacgcgctaaatatggtcatttaagccaagttcaagggttacctgattttacaatcactcaccctaatttggtcattaaaccacatactggtgcaattaaaaaaggagggaaccaagcatgagtgaatggccattagttacctttactttgttagtacaaagttctgttggtgttactatttttactgccctctatttttgttggttagagaaagaaataggtaatcaacgagcaacacgcactttgcgccccgtattactgacaagtgctatattgggatgcttaggattattagcctcaacactgcatatgggatatccgtggaatgcgtttcatgccttgcgccatatatcatcatcatggttaagccgtgagattatctttgctgctctttacctgggcgcactatgtttatataccttgctagtactaataaaaggtcatatgaataaaaccctcttagccattatcggtttactggggttagtggatattttctgtatggcttcgctttattacagcacatcgatgataacttggatgcatgttaatacctattttatgtttatcggttctgttttttctgcgggagcggtgatcacgttattgatcacttcaataagggttaaagcctttgctgatggcgaacttgctaaaaaaatagtattaagtgctttagttggtatttttcttgctgtgactatccgtatggcagagcaaccactttatttatcatggatgtcagaaatacaattaaccaatgatgcaattacttttcctcatacccctataattgcgtataatgagactttcggattaagaatatctgcatggatattgtctattatcagtatattaatgatgggatatagcctgtataaatatcgtatagctgtatttacttctgggttatctctaatttggggtagcggtattgtcctgttaattgctgagatacttaaccgatttgcattttttattgttaagtaatagtaatggagtcatgaagtatgaggcgttttattagggtagatcttcctcctgaacctatcattaatgataaatgtgttaggaaacgcctcaaacaaagcctttgtgatagctgttcaaaagtctgtcctgtggacgctatcacttttagtcttttgaacgttgaaatagataatgagcgttgtttccaatgcggtaattgtctatttacttgccctgttgacgctatagaaaatatctccccccatgaacgtagctttcaagataatctattagtcattaatcatgatgaaccactggccagtattgaagagcttttggtttggcatcgacaatatcaaatacgcggtatgaaaatagcggaacccttggttgataagtggctgccgatactcgcacaacttaatttgcaattaaaaaccttacaagagcctatttggcaattagttttagtggagcctgaaccggtcgatagtggtcgtcgctttatgctatttcgacaaaaattagatgaaaagccacttaataaaggtcacgtaaaaacaggattaaatgcaaggaaacagctttatccgcaagatagctggttccatattcaattagataaagaaagttgtattctttgttctgcatgtgccaaggtgtgtgatgaaggtgcaatcacaatcgaagataatcgctttatcattgatgaaaaacgttgcaccggttgtatgaactgccaagttgtctgttttccaaaatcaataaaagtcgtagaacaaattgctaaaaatagcacaccgacacattaccattattatgatgcacaatgtgataaatgccgccttgctttttttgcttgggagcctaatgccaccttatgtccgatttgtactcagcatcaaaaacagggatggctataacagtgtttataatttgttctatgcaaaaataaatttatctcaataacatcattacttaaataaaatgactatttttatgcgatagtgattgttgataaagatctcattcatttctaagtaaggtgacatcatgataaaaaataatgacttacctgcttttatgacgcaagtggttattactgaacccggtggcgttgataaactgcaattagaaaatagcccattaccgtcattgccccctcattatatgttggtaaaagttaatgcagcgggtgttaatcgccctgatatttttcaacgtcaaggtagttatccaccgccagccgatgcatctcctatattaggattagagattgctggggaagtggtgaaattaggtgaacattgtacaaaatgggcaataggtgatcgtgtttgtgctttagttgctggtggcggttatgctgaatattgtttagtccatgaagatatcgctttaccgtcgcaaggattaagcgatattgaagcggcagcattacctgaaaatttatttactgtttgggcaaatctatttcaactcggtcagttaaaagcaggggaatcggttttgatccatgggggcacttctgggattggctctatggcgattatgttagcacacaatcttggttgtgaaatttacacaacggtaggttcaaaagaaaaagccgaagttgcccaaaaattaggggctaatcatgttattaattaccgtgagaaagattttgctacagaaattcctgtattaactcaaggtaaaggcgttgatgtcatacttgatattatcggcggcgattatgtggaaaaaaattatcaagttgcggcgaaatttggcagagtgatccaagttggcatgatgaaaggggcccctaaaaacttaaatatgatgccactgatgcttaagcgattaattcatacaggttctaccatgcgttctagaacgccagaagaaaaaacgcatatagcacaagaattaaaacaacaagtatggccgttgattatcaaaggtcaaattaagcctattattaatgcggtcttttctttacaagaagttgccaaagcacatcaattaatggagtctggtgacttaattggtaaagtagtgcttgagattgatatgaataaatcactggtgtagagctaaaataaatttattttatttattataagttataaaagcattctcattctcaatcacgattattctgaaaaaacacataataaagatattatgtgtttttttattctctataaaaaatttaagaagctttaatatgatcctgtgctttttgcgtcattataaaaataaacctcacttaataatccatcttatctaagataaaaaatcacttatttaaaataaaacagatttaagtatcgactatggtaaaaatattataataagttttgaaaaatagcataaatcaaaattgataatgaaatttataaactaattaataaaactaaatcatttatcatgaaaaagtaaaaactttagaacgaacttggaaaatcttatctgatatcaataaaataaagaagattcttactcatcatgtagtatatcatttaaaaagagactaattatttacgtaaaataaactcaattctgattaaaattgataacaaaaatttatatataggtgcgatgatggcaaatcacaaagaaacctgtctgagtgctgcagagcgtgtgtttgatacccgaaccgtggataccctaacatgttatcatcgagagatggtaaagatgttgatggatagtgagtccttttattctagtccaaataactcacagataaatactaatgagagattagagaacaaaataaaaagcaataccattgaaaataaagctgtgaagggatcttatggtgatattttaaataatttaaaccagcagctaatgaataataaacctgagattgagccttatttctcacattacaactctcccgtcatgcgattggcgaaattaggctacctttctgcactggcctataatgctgataatgtttttaacaaacattcacccatacaaaaacagcaagagcaaaaaataactcatgatttgtgtaaactaatcggttttgaaccagataaagcatttgggcatattaccaccagtcatgtttttgcttgttatgaaattttgtgggctttgagaaatttaaaaacactgccgatggcgattgcacgtcatccaaaatcaagagatctggttgcagataaaaaagcatttgagttatttaatatgtctatcactgatattttatccatcagtgaacagctatatgagcgagatatttttgatgatgtcagccatttaacttgtcgtggcaccggcatgacaagaacgatgcatttaggtaaattactagtaccgatataccgcttcgaattttggaagaaggcgatggatatcttggggttaggttatgataatctcattgccttaccaatagatgaagagtttaaaacagatatagctaaaacgcgtcatattgtgcttcgcttaatagagcagggagagccgatactcggtattattggcgtgttaggctcatcgacatacggtagcattgacaaacttaagcctcttttcgaattacgtgaagagtgtgaaaaacaacataacaactcattctatattcacattgatgcatcccaattaggctatatgaaaagcctgtttcttgacgaaaataatagcatcatcccttataacatattgtgcgataaacttaagcaagaagcacctttacttgagttaacctcagatatttatgatagttttactcagctatcaagagctgattctgtttcttttgagccatttcaagcgggattttctccttatcctacggggattgtttgtataaaagatgctcgattaagtcgttttctcgctaacccgccaaaactgtgcccagaagaggggaatattcccgatgaaattgatgggatccaatcagcacctgcggttgcatcaatgtgggggatccatcagctatatgcttttaatcattttgggtatgggcaatgcgctcaaaatcaatgggaagctagagtaaaactggaacaacaattaaaacaagagaacgaatttgaaaaatcgggtatctcttatgctattcatattttgccagtttcagattttaataaactcacttttgccattgctcttaaaggcaaccaatgtttaaaaatacaaaatcagctaaataatgctatttataaaaatttagaaataaagagccaatataagccagatctcaacctattagtgctgtgtgctcgtaatagcgatgatatacctgctcagttttgtcaacaatgtcatttaggtaaagatgaatggaagcaagttaaccacttaagtcttttacaattaacgataaaaaacactgataaatggagtgaagagcatattaaagcagggtacgactatattaaaaaagttgtcctatctgcattaaaatagctattttgttctatttattatttaacatagtaaaagttagcaaggaaaaggttgctaacttttttagtttacccttataaaagtgacgctgtcactaaagttactccttcctttgcttgtttcgtttgtctagctccttattttcgttataaatagcacataaaatcaagctcgagaatgagaatcattcataattaggagtgaatgatagaatgtaactatagataaatcatattgttactattccttatgatagataaagtaaatagatatatctaaaacttgatcatttagatatatcggattatattggtcatcaatgatttcgatatatctaaaaaatgagggaatattatgatgatccaagcgttacattcgctttatcaacaacacaccgataatggtggtcatggcatcggacgttgtggtggtaaaggtaaacacagaggacaacaccacaatggcaataatgaacattgttgtcatggtgaaagaggccatcaccaagaaggtcatggcaaatgttgccaacagggtgagcaaagtcatgagcataatgatcatgccgaacatggctgctgtcacggtgaaaaacagcaagagcatggtaaacgacatggccgaggttgtggtgctggtaaaggaaaaggaagaggccaaggtcgtcaattaaaacgtatgtttgaccatggtgatttacgtgtccttttgttgagtatgatcgcggcaaaacctagccatgggtatgaaattattcgaggaatagatgaagcatcttcaggactatatgtaccaagtccaggggttatatatccaacactgacactattagaagagcaagatttagttgttgctaatatcgctgaaaaaggccgtaaaaattatagtattacgccagaaggttcagcatttttagcagaaaaccaagaaacagaaaaaaatattcaaaataaactggcttatgcacgtgatttatcacaaaacgcagggggagtttctgaggaaatcgaatttgcggtaggaaaattaaaagcggtattacgtcataagttagtattgaaacaactttctgtagaaaaagcgcaacgcattgcttttatacttaatgaagcagtcgaaaaaatagaagccattaatgaggcattgatctctgaggtaagggaagatgaataaaacagaaacaccattacggaacagaagcaaaaataatgatattgaaaaagaagagctagaaaataatccagccgtcaaagagcaaatttgtcctaaaatgccagtatcctattttcgacgagcgttacgaaaaacaggtagactatgataatgctagacagaggctatccatatgctatagcttctgtcgttttgagcatgctgcctcgcatatttcttttatcatgtcatcatttttttcaacgcactgttttttcaaatagttctcactactaatgaggcactttataactatttcagtggttttttattagttttttattataagttgtgagactcctcgcttttttattcttagttcattacttgctgattttattgatactgttattttttaatttgtcataatattcgagataccattgatatatggtaaaaccaaaatgctacccatgcatctatatgaataagatgatagataagataaataagatgacagataagataaacagtacctatatgccttacaaacattataaaaatagcatagcaatattatttctcgcctctgccttgctacctagattttctgtggctgaaccactcactcatttacctcaaaaagatcgcatttcttattttgctcaagcggagaaaatggccatcactggtgtggctatcaaaaccaaacccgttttagccagacctgcaaaagaaggggaagtgatcaccacttacataaaaggtgaaggggttgaaactatttcggagccagccaaagcgggtgattgggttgtacaaaatatttgtccagcaacaggtaatgaagaaattttggtcagaaaagataaatttactcagcgctataatctggctgatgtagacaaagcgaaaagcatcacaccgataaggcaaggctatcaagtttttatccctaaagggattgaaatgaattattttattgttccaaaacaaaccgctgagtttgcaatggaagcgccctggggagagctacaacgttttcaagccggtgatgcagttgtgcaatctaccaccgataaacaagatatttatcggatccaacaggccgcttttaaatgcacttatactattttaaaaaccgccaaagagatttgatctgtatatatgtgataaaaagcgctaaattgaaaaaataattgttactttttatagagttaattttatagttttactgctaaaaatagcaataattagctttttttgtcattaaatcgtgtttttttgtattttttttagtcatttgcgttagtcgctacatttcgttaatctatctctatcaatttattaaactcattaggtaaaacctattgatatgatagtaggaatgtattagatattctcaattggaataggtacattagattcataccaaacaggaggaaatacaatgtctttaattaataccccaatcaaaccattcaaaaacatggcatttaaagacggtcaattcgtagaagtgactgaaaaggacgtcgaaggcaaatggagcattttcttcttctatccagctgactttacctttgtttgtccaacagaattaggtgacttagctgatcattatgaagaattccaaaaaatgggtgtagaaatttactctgtttctactgacactcattttactcataaagcatggcatagcagctcagaaactatcggtaaaatcaaatatggcatgatcggtgacccaactggcgcattaactcgtaactttgaaaatatgcgtgaagcggaaggtctggcagatcgtggtactttcgttgttgacccacaaggtatcatccaagcaatcgaaattactgctgaaggtattggccgtgatgcagctgacctgttacgtaaagtaaaagcggctcaatatgttgctagccacccaggtgaagtttgcccagcaaaatggaaagaaggtgatgcaactttagctccatcactggatttagttggcaaaatctaaaaaattctaaataagaatcaagccactaaagaagctactaacgtagttatttatcgggtgtttcggcacccgattttattgagggtgcaaaaatgttagataataatttaaaagctcaactgaaagcttacctagaacgattaacccagccagttgagttagttgcaacattagacgacagcaaacattctgctgatatccaagccttattaaaagaaattgaaccgttatctgataaagtcacataccgtgaagataacagtgctaatgtgcgcaaaccatcttttcttattaccaacccagggaaaacaactggcgttcgttttgcaggctcgccattaggtcatgagtttacttctttagtattagcattattacaaaccggtggtcatccatctaaagaagccccagaattacttgaacaaattcgtcagttagacggtgagtttcatttcgaaacctattattcgctctcttgtcataactgccctgatgttgttcaggcattaaacttaatggcgattttaaatccgaacatcacccatacggcgatcgacggaggcatgttccaaaatgaaattcaggaacgtaatatcatgggcgttcctgcggtattcttaaatggcaacgagtttggccaaggtcgtatgactttagctgaaattgttagcaaagtagatagcaatgcagaaaaacgcactgcagagttattaaataaaaaagatgcctttgatgttttgattgtcggaagcggccctgcgggggcatcagcggcagtatatgctgcacgtaaaggcttaaatacaggtcttatcggtgaacgttttggtggacaagttctcgatactgttgatattgaaaactatatctctgtacctaaaacagaaggtgcaaaattagctggggctttaaaagctcatgttgatgattatcaagttgatgtcattgacagccaaactgtcagccgtttaattccgggagcagcggaaggtgatctacaccaaattgaaaccgcatctggtgcgattttaaaaacccgtagcttaattattgccacgggtgctcgctggagaaatatgaacgtaccgggtgaaaacgagtaccgtactcgcggtgtaacatactgcccacattgtgatggtcctctatttaaaggtaaaagagtggctgttattggtggtggtaactcgggtgttgaagctgccattgacttagcgggtttagtggagcacgtgaccgtactagaatttgcctcagaaatgagagccgatgctgttttacaaaataaactgcgtagcttaagtaatgtcgatgttatcttaaatgcccaaacaacagaagtatatggagatggcactaagttaacaggactgaaatataaagatcgcactaacgattcaatgcatgatattgccttagcgggtattttcgtccaaattggtttactgccaaacacacaatggttagacggaactgttgagcgtaataaaattggtgagatcgtggttgattcacgtggtgaaaccaatattaaaggggtatttgctgcgggtgactgtacaactgttccttataaacaaattattatcgccgcgggtgaaggtgcaaaagcctcattaagcgcctttgattacttaattcgcacaacggcaaaataagcaaatcaaagataatcaataagttatagagaaaggcatcttttttaagatgcctttttttgtatataaaatcatcaagaagggctaaaaagtggctctaagtgttcaagtgtggacagggtgttgtttaaaaataacttctcaaaccaaaaaccgttttctgcctatttaatttttaagcaatttaaccattccaattaagatactttttacatctatttttctttgttcaagaaaaatgctattcaaaatttttaagcaatctatactattattccactacttaaataatctataaggaaattgattgatatggttctaaaaaagagatgttttagacaaattgctcctgcgcttattttttctttactaacaattggtactttctcggcgaatgcgaatatcgatgttcgcgatgaaaccttatttgaagcacatcagcgttttaaaacacaaattataaatgatagttttgacaatactgaagcaccttgggaagcgccagcagaaatattcaatgtagttaaatatccggccaaactaggtgatatgtatgcttatttaacccctccgccggcgaataaaaaaaataaactacctgcggtgatttggctgaatggaggatatggtgggataggaggagatgattatttttggacaccacaaccagttgaaaatgaccaaacaggagcgacgtttcgtgatcctaatatggtactcatgataccttcttttcgtggtgaaaataccaaccctggtcgctatgaaatgttttatggtgaattagaagatttagactcagctagagaatatttagcgtcattaccttatgttgatcctaaacgtatttacgtagtaggacatagcactgggggaacgagagcattattggctagtgaatacagtgataaattcagggcaatattctctttaggaggaatacctgatcttaaactacgcacagaagggcggatgatggttgaattaccctttgataaaaataacgaagaagaatttaatgtccgttctgtataccgctatattaaatcaataaaaacaccaacattttattttgaaggtcatgattatttttgggatgaattcaatgaattacgtgtggttgcaatggaacacgatattcctctgaaaatttataatataaaaaatggagatcattttaatattattgtccctgtcagccaattaattaaagaaaaaatattgcaagatactgatacaaataaagaaagtaatattcgattcactaacgaagaaattaagtggatcaataaaatggtgaaataaattttaaaataataaaactgctctattatcaattagataaaagagcggtagtatctattttgagccgatatagtgcgtctaaaatttcatcatatgtgcttaaaagtatttagaactttgttgacagtctctttcaattatcaaaacagaagatgctagaattgtttatattgtcttataaacatatagttttaggtaaaaatattaagtatattatatatgatatgaaagaatacaattttaaaatagaaaggattgaatatgaaaactaaaatagtttatcaatggaaggaaaaaagacgggatagactctcttttttaggagcagaagtggttttttctgtgttatttggtattgtaaacggtttaatatatatgttatttatgaccttgttacctgattccgttgagaatgatcctgataaattatttttttaccaattctcttttagttcttatggtatagtcgaattcatattattaatagcacaaatctacgtatttgcacttattttaactcaacgagtaagagatttcggtttcaaatatcctatcactattgcactgatctttaccattggcaccatggtccttacaccatatccattacttatttcttcagatacaatggtaatagtgcgttttattttattattaggatatgttattgcattattattaccatcttcgaataatgttgagtgtaataacgatgaaaataataagataaccatactaaaatagttaactaataagtgaattatcctaagtgtatcaggcgtaatggatacacttaggacattataaaaataatattataatagtggtataagaagaaaatataaaaatagtgaataataacttctataattgcaatatctacagtgactaatgaggttataatggaaggtgttcaatttaggcttgcggagcctcatgaagcaaaacgattatggtatttaagaaataaagcgttacgttttggctgtcaacatgtctatccgcccgatatattagccgcttggactcctgatgaaatgcctgacggctatagacaatctattattaataatcctttctatgttattgatgataaaaagttgtctattcccgtggcttctggttttttagatcttaaaactggctttgctgaagccatttttacattaccggaatgcatgggaaaaggatatgcaggacttattcttaaacagctacaatatgaagctaaacaaagaaattttgttcagttatttttagatgcaacgcctaatgcgatgctattttatttaaaacaagggttcactgttttagaagagcgagagtactattctagcttggctcaggcaagtttacactgttatcgaatgtatattgatttataaaatttataaatagtgccttattgacataaaaattatacctagcattatagaacagaaaaagttgggcttaaaatgcgaaaattttttatttttatcattttttgaattagcttttatattaacaatatcagttggtaattttgctaatgttacgatattgtaaattatgactatttttctggggcacacactatgcaaaatgtgttgttaacgttatggcctttatttgcgttaattgcgctaggcgctattttaagaagaaataaagcatttgaacctgcattttgggtaggggctgaaaaattaaattattttttactctttcctgcattacttctcaatagcttggctaatgctcctttatctgatcctcaattacctcaccttgctggggctattttctcagtagtcatcattaccactattttgtgtgttatttttaaaaaaataaccggctggtctgctggccgttttggtgcgatcgttcaaggcaatattcggtttaacacttatttaggtttagctattgtcgctgatttatttggcgttgaaggtttaggaatagctgctttgatattagcaaccttggttcctctatcaaatgtgacttcagtgctttgtttaaccgcagggcaaaatgtaacttttcgtcaattaatcttcccaattattaaaaatccattaattatctcttgcgtaatagggattgttatcaatttatcaggaatagggcttccttttggtagcgatcaatttctaaaattgttagctgcgactagtttacctttagggcttatctgtattggtgcggcattacatttatcaacactaaaagcagaaagtaaaatgattagtattaacacagtgactcggttgcttattgtaccgataattgcatatagtgttgctaattttttaggtttgtctccattagttatgatgcttttagtcattttcttttctatccctacagccccaacttcttatattttaactcgacagctaggaggggattctgagctaatggcggggatcattacttcacaaaccatgcttgcagcaattaccttgccgatcgtattaagttttttaattccataaatttaaaggaaatgcgactaatattatttatcgtgggtgattttttatagcatagtgtcactaaaagtgttcttctcttaaatgtaattttaattattatatggttaatttaagaggaaaatatgatgagtgtaaaaattaatcacaatgatatttctagtttacagatattaagaatatcacaaggagaaaaaacaaaagatgtgatgtcattatgggataaaataaaagactggttccaatcaaacaaaagagaaaaagcactaaaaatagttgaaaacattgtagttgaagagaaatttgatgacaaaaacaattttaaaatgctatatcatgttttaatgctaaaaactatggcttcagatgcatataaagaaagaataaaaatcaatactaatgataatgataaaaatattacgatttcaatagataattataatatttctataacggatatagacaatgaacaacttaataaaatgtcaacaataattaatgcatttaatcggcattcattaattttttctaatgaaattgcattgaaatgtctatatgaaaagttagataaaaatgagcttaatgatcaaatttttgctgagttgtatattgaattagataataaaatacgttctggtgaaatagacttaaagcttaataaaagtaactttaatcaagttaactttagtgctataagacagctcgtaagcaaagcgatagaaaatgataatactaacttagatacagaaaatgataatgctaacttagaaaatgataatgctaacttagaaaatgataatattaacttagaaaatgataatgctaacttagaaaatgataatgctaacttagaaaatgataatattaacttagaaaatgataatgctaacttagaaaatgataatgctaacttagaaaatgataatgctaacttagaaaatgataatgctaacttaaatataaaaaaggcactaataaaagatataaatagaaatacttatattttcaatggtaaagaaataaaaagtaaagatcaagacgaggcaatggaagaatttgaaactttaactaaagatatctcagagaaaaataaaaaggcaatttattatttactaaatcaagaagggattaccttaattaaatcatataatgattcttttgattactacacattaacaacatctttttctatgagtaatgttgttaagcaagaacaaatttatagtataaagactctttctgatgatttaattgaattaaaaataaaattttttaaaaaaagtagcgataaaataaatctaaatattcccttagctcaaccatttgaaagtaagttatataattttatctatgatatggttgctattaataataatatcgaaataacttatgataaaattttaaatgaaaagatgaacgagataataaaacaactaaataataaaaaaccaaggctaggagagctattctcccatctattgagtcgaaataaaatcattaaagaagacagcgttgatattacgttaaaactaaataaaggacaactagtctcattaggtggagaatgctcatataatttttattaattttatcctttggtcaaaatagagcttcttgctatgatgtgaaaaacgtgagaataagtagaggctcctttatgtcaaaacctcataacccagaaattcaaaaaattattaatcagttaaaacaacaatatcaaaatgctgttgatgccttacgtaatgctattattatgtatgctcaagatggaaaattacctgatataaaacaaagggctgaaggtctatttgcttatccgcaattaaccgtacattggtatggtgatgttaaaaaagaagataaaacaagagcttatgggcgtttatcaaaatcaggtacttattctacgactatcaccaatccaactttatttgaaaattatttaactgagcaactgcaacttattgcggatgcttatcatgtctcttttgaagtgacggcctcaaaacaagagataccatatccttttgtcattgatggcactggcattggttttgatcggtcaatgagcgcctctttagcaaaatattttccgactaccgatctctctaaaattggtgatgatattaccgatggtttaattgatgacagcgagcttttacctctttcacattttgatgcactacggacggatttttctttggctcgtttaaagcattataccggaactttacctgaagatgtgcaaccttatattttattcaccaattataatcgctatgtggatgagttcgttcgttgggcctgtgcacaagttgctgataaaaatagtccatattgcgcactttcttgtgcaggttttcagcaaataaccgccgatacggttgatccggaaaaattaatttctgatctgacatggaaaaaatatcaaatgcccgcctatcatttaattgcaaaagaagggccgggaataacattagtgaatattggtgttgggccgtcaaacgccaaaacaatttgtgatcatctggcggttctacgtcctcatgtttggttaatgattggtcattgtggcggcttaagagaaagccaattattaggtgattacgttttagctcatgcttatttacgagatgatcatattttagatgctgtattaccgccagatattcctattcctaatattgctgaagttcagcgtgcactttatgatgccactaaagccattagcggtaagcctggacatgaaatcaaacaacgattaagaacaggaacggttgtgacaacagatgatcgtaattgggaattacgtttttcagcaacatcaaggcgatttagtttaagtcgagccgttgccgtggatatggaaagtgccactattgccgctcaaggttatcgttttcgcgttccttatggcactttgttatgtgtatctgataaaccgttacatggtgaaataaaattaccaggacaagctaatcacttttatgaaggtgcggtatcagagcatttgcaaataggtattcatgcaattgagttattaaaagacgaagaggataaattacattctcgtaaattaagaacctttaatgagccgccatttagataagccatagctaaaattaataagatgaaaatttatatacccaatatcattgattgaattgggtatatttttacaatataaaaggctaaaaacgtaaatgtcgagccgcttttctaagacgatcatcaccacgtctatcatagcgctgtgtagtcataatactggcatgacccatggcatcttttacggttacaatatcttcgccattatctaacattgcagaggcaaaagtgcgtcgcagatcgtgaggagcaaatttatcaatgccactttcttgttggcgtgtctctaaaatataataaatggcttggtctgttattcgttcatctgttacatcatcaaagcggcgaatacgtgtgaaaagggcgccatcttgtgctccccttatttcatcgatccataactgaacacgctcccaagtatcttctggcatataggatattctttctttattaccttttcctctgacaataaaagcttgatcacgaaattgaatatgctcgtaattaagcgcaacaatttctgaacggcgtaatccacagccaagtagtacacttaatatggccgcatctcttaaaccttttgaggagtggtctttttcacaacagcgaaaaagtgcgcgaatttcatgtccagtaagcgctcgacctttaggtaatcgactgcctcttaccgatttaacttggcgaatatgttgatagctttctgtatccatcaatttcatcgcccatgcttctaaagcgacaccttttagtgcagctaaataagtgttaatcgtggcgggtgctttatccgcatcagataacatgtcgataattgcttgaatatggtggcggcgaagtgctccccattggcaatgctttattgaagagaagccaatcatttttgccacgatagttaaaaatgatcccatcgtttggcgactacgtttagaacctaaactgcgtaaataagccagtgcagggttagtttgtgtcggagaggtgaaagttgcattgagatctaataatggttgtttttccgccaatacaagtgatgtttctggtgttatttcttgatcgtcgtggtgaaaatccacagcaatttccttattaaatcaatataactatgctgaatattctaacagatctaaaaaagaaaaaagctactttttcaaaggatcattttaataagtagaggcgatcatgtttgtttttagtgcataatgtttgttttataaacggttttagagtgcgaagtgaacagtgggttttacccatgaaaggaataaagagatcaaaatagagggatgatcgtggaaatggcttaatattatgcctttggtttatctgtatttttaataacagtcgctaaaaaccaaaggcatagttttaaaataatgaaggttaatctttataaatggcgactagtggtttgccatcattaccaatggtgcctcgatacattccctcagagttaaagctcatcgtatagtttccagatttgtctaatacgataacaccaccacttccatttatcgcttttacttcatcaagtgcattttgtgccgcttgctctagtggtagtttttgatatttaacttgggctgcaatattaaatgcggtcagcgttctaataaacatttcacctgatcctgttgccgataccgcaaccgtttcattatccgcataattacctgcaccgataataggggaatcgcccacacgcccataacgtttattggtcattccacctgttgatgttcccgccgctaaattaccatgttggtctaatgcaacagcgccaacagtgccgtatttataatcatacatcatcggatcagcaaaaagagccgcagttttaccatcatgatctaatacaacttgttctttttctaatgctttttgtagttgttgccaacgatattcagtacgaaaataactcggatcaacgatggttaacccttgctctttggcaaaaagatcagccccttgagaaaccatcataacatgtggacttttttccattaccgcaatagcggcattaatcggattttttactgtggtaacaccagcaacagcacccgctttgcgcgttttaccatccataatagaagcatcaagttcgtttctaccatcgtgagtaaaaacagcacctttacctgcattaaaaagaggagagtcttccataacattaatcgatttttgtacggcttcaatactggtgcctccactatttaaaacagcatatccagcatttaatgcttcggtcagtttggctttatattctttttcttgttctggggtgatggtatctttcgttattgtacctgcaccaccatgaataacgaggcggataggggcttgtgtattattagctaacgcagaagaggcaaaaagagtacaaagggtaagtgtagcgagcttatagttaatgtttttcatataaaccttctcttaatcggattgagttgtgtatttgcagggatgttattactttaattgtatattgttatttgatatataattattaactgcaataatcactatataaaaactttacctaataagtggtctgatgacaggcaaaaataacaaataatttcaatttaaattaatgctataataatcaaactgttatatttaaggagttttatgcaattaatttaaaattaaatcttgcaaataaaatattaaaataaaagtatgttggttattatttatttttaatgttgttaaatttatagcaaaatcaaaaaatagctaacttcatcaacattaaatatgtgacctcgatcaattatcgtaaccaagtgttattattatattttgattttaatgaagctaatggatgctaaattttatacattttgtgtgttatctcgaataatcaaattttgatagtgtattatgtgataaaagtactacattaaattcacacaacacactatcatattcttattatattttataattcatatggttaacttttgtttttctctttttttattttattttaattcgctttatatatataaatggactatttttaaagaagatgaaataaaattaaaaattgttatttaactattttcttacacacagtaaatcacaaaaaattgggttatttatggcaaaaggaaggttaaataatttatatgaaaaatcaaaaaacgaatcgtttttttgtttacggcattattattgttgcaattattgcagcaggtattttttggtggaaaacacaatcaccagcactccctgatgggtttgctcaaagtaatgggagaattgaagctactgaaattgatatttcaaccaaaacaccaggaagaattgacactattttggttaaagagggggattttgttaaagcgggtgaagtgttggcaacaatggatactcgtaccttaaaagagcaacttcatgaagttcaagcccaactagagcaagccaaaagtagcgttatgacggcagagtcggcactttctcaacgtcaaagtgagcaagttgcagcgcaggcggttgttcgtcagcgtattgcagagcttgacgcatcagtaaaacgccttaaccgatctcgagcattagttaaaacaaaagcaatttccattcaacaactggatgatgatatagcaagaaccgaaggggctcgtgctgctgttgaagctgcaaaagcacaagtgactgcaaccattgcggcaattgattcggcaaagtctggaattattcaagcaaaaactaaagttgatgcagcaacagctaccgaacgacgtattatggctgagttggatgatagtatcttaaaagctcctcgtaatggccgtgtacaatatcgtgttgcggaacccggtgaagtgctaggcgctggcggtcgagtgttaaatatggtcgaccttagtgatgtgtatatgacattctttttgccaactgaagccgctggtaaagcagccttaggcagtgatgtccatattattttggacgcagccccacatattgtgatccctgcgaaaacgacttatgttgccagtgttgcacagtttacccctaaaacggttgaaactgacaatgaacgtttgaaactgatgtttcgtgtaagagcgaggatctcccctgaattactagagaaacaccttgaatatgtcaaaacaggtttaccgggacgtgcctatattcgcttagataatagccaaccttggccgactgatttagaggtgaaattaccacaatgagtcaactaatgagaacgcaaagtcattctcatatcattgaattgactcatgtatcccaacattatggtgataccaaagcacttgatgatgtgacattgactattcctgccggaaaaatggtcggcttaataggcccggatggtgtcggaaaatcgagtttaatttctcttatttcaggagccagagaaattcagcaagggcaagtgatagtacttaatggtgatatgaatgatgttaatcaccggcgagctgtttgccccaaaattgcctatatgccacaagggttaggtaaaaatctttatcacacactttctgtttttgaaaacgtcgatttctttggtcgcttatttggtcaatccaaacaagagcgagaagagcgcatcaatgatttacttgaaagtacggggttagcgccttttaaggatagacctgcgggtaaactatctggtggtatgaagcaaaaactggggctttgctgtgcattaattcatgatccacaattgctgatcctcgatgaacccaccacaggggttgacccattatcacgggcgcaattttgggagttaattaatcgtatccgtaaacgtcaaaccaatatgagcgtattggttgcgacggcttatatggaagaggctgagcgttttgattggctggttgcaatggatgcaggtaaggttttagccacaggtcatgcggaagaattaaaggcgcaaacggcgacagatgaattagaagctgcttttattgagcttttaccggaagaaaaacgcaaaaaccatcaaaaagtgattattcctccacgggataaaagtgatgacgatattatcgccattgaggccaaagaattaacaatgcgctttggtcagtttgttgctgttgatcatgtcagttttcgtattcctaaaggcgaaatttttggttttctaggctcgaatggttgtggtaaatccaccaccatgaaaatgcttacaggtttacttgaggcaagtgaagggcgcgcttggttatttgggcaagaggttgatccaaaagatatcgaaacccgtaaacgcgttggttatatgtcgcaagcattctcactgtatagcgaattaacggttcgacaaaatttagagctacatgccaaactctttcatatcccagaacaggatattcctcaacgtatcaaagaaatgagtgagcgttttaatttgaccgatgtggaagatatgatgcctgacggtttacctttaggtattcgacaacgcttatcgttagcggtggcagtgatccacaaaccagaaatgctgatccttgatgaacccacctctggggttgaccctatcgctcgagatatgttctggaagctgatggttgatctctcaagacgtgacggtgtcactatttttatctctacccactttatgaatgaagcggcgcgctgtgacagaatgtctctgatgcatgccggaaaagtgctagtgacagatactccggctaatttagtgaaaaatagtcaatttgatacactagaagaagtatttattgattatttgaaaaaagcatccggtgaaacagaaacgcccgatattgaagataaacagctacaattgcctgcctctagtgaagaaagtgcggaaaaagcgttaaaacaacgatttagtttacgccgtttatttagttatagcattcgtgaagggatggaattacgccgtgacccagtacgccttaccttagcattactaggcacggtaatattgatgtttattatgggttacggcatcagtatggatgttgaaaacctacgctttgccattatggatagagatcaaacagggctaagtcaggcttatagtcaaaacctatcaggctctcgctattttattgaaaaagcgccgattaccgattataaccaacttgagcgtcgtctccgcagtggtgatattactgttgcgattgaaattccgcctaattttgctcgagatgttgctaaaggacataaagtaaaaataggggtttggattgatggcgcgatgccaaatcgtgcagaaactgtccgtgggtatattcaggcaatgcatctaacttggatgttagatatggccatgcgtcaacctaccaatatggttgatcaattttcccccattgatatcgaaacccgttatcgttataaccctgatgtaaaaagtttacccgctatagtacctgcggttattccgttgttgttgatgatgatccccgcgatgttaagcgccttgagtgtggtacgtgaaaaagagctaggctctattattaatttatacgttactccggtcactaaagccgagtttttattaggcaaacagatcccctatattttattgggaatgtttaacttttttatgctctgtgcgctttcggtatttgtttttggtgtcagttttaaaggaagcatgttaacactctcattaggggcgttgctttatatcactattgctacgggaatgggattactgatttcttgttttatgaaaagtcagattgcggctatttttggtacttcaattattaccttaattcctgctacgcaattctccggcatgattgacccagtatcatcattagaaggtattggtaaatggatagggcatatttatccgacttctcactttcttactatcactcgaggaacgttttcaaaaggacttaacttatttgatttgccttggtcttttattccgttacttatcacgatccccattgtgattgggctgagtgtctttttcttgaaaaagcaggaggcttaaatgtggcataccgtacaaaatatttttaatttaggaataaaagagttacgaagtttatcccgtgataaggcgatgctggcattaattgtgtttgcctttaccgtatcaatatactcatcggctactgtaacaccaggctcattacaccatgcgccgatagcggtggctgatcaggataaatctcaactttcggcccgtattgtcaatagcttttatatgccttactttttaccccctgcagatattacacccgagcagattgatggtttattagatagaggaacttatacttttgcgttagatattccgcctaattttcaacgcgatctactcgcaggacgtaagccagaaattcaagtcaatattgatgcaacacggatgagccaagctttcttaggaaatagctatattcaaaatatcgttatgggagaagcgaaaacttttcttgctaaagagcgcactaacgatccactgcctgtggatttagaagttagaatgagctttaacccaaacttaacacaatcttggtttggctcagttatggcgataatcaataacattaccatgctatctattgtattaaccggggcggcactaatacgagagcgagagcatggcactattgaacacttattagttatgcctgtcacaccatttgagatcatgctgtctaaaatatggtcaatgggattggttgtattgttagcgtcggccatgtctttagtgctagtggttaaatcactgctacatgtgccgatcgaaggctctgttttgttatttatgtgtggggtcgcgttaagtttatttgcaacgacatccattggtattttcttaggcactatggcgcgctcaatgccacaatttggtttattgatgattatggtattgttgccattaaatatgttgtctggagggatgacctcaagagagagtatgcctcagtttgtacaagatgtgatgcaaactatgccaaccacacattttgtcagccttgcacaagcgatattgtatagaggcgcagatttctcgattgtttggcctcaatttatcgttttaattattattggctcagtcttttttgcattggcactgttacgttttagaaaaacgatatctgcaatggcttagtcgttctgataaaccgaaaaaagagacttaaggcataaaacgataaccgatccccgtttcagtaattaagtgcactggacaggtgggatcggtttctattttctgacgtagatgccccatataaattcgcaaataatggctatgctctacaaagttaggcccccaaacatgctgcattaaatgacgttgagttaatacttttccactattgttgacaagttcactgagtagacgaaattcggtcggagtaaagtgaatgggtacgccttggcgagtgactattcttttaacccaatcaatagtgatatcaccaaatgtaaattgagtcgtttctgtttcttgtttgacaaagcgacgtaatgaagcacgaacccgagctagtaattcactcataccgaagggtttagttaaataatcatcagctccagcgtctaaagcatcaactttatcttgttcagaatctctggcggataacacaataatcggcgtgctactccattggcggaaatcttgaataaagcaaagcccatctttatcaggtaatcccagatcaagaatgactaaatcaggttttcttgatgctgcttctattaatcctcgttgacattctgaggcgtcataaacacgaaaaccttcgttctctaatgcaaggcgaacgaatcgtaagatctctttttcatcttcaacaatcaatatgttatatggcgtcactgttttatttcaatctcatcaatattcggtagtgattttaaaggtaaaacaaagtgaaaactggctccaccttttttattattttcagcccaaattttaccttcatgtaagtggataatagcactgcaaatagcaagacccagcccaacccccggaatggcggactcttttactgcacgtgaaaatttattaaaaataagctgcaattgttcagtgggaatacctgcgccttcatcccaaacttcaacatgaatttgatcctcttcaaccgtagcttttatgcctaatttagtttgtgatgcggtatatttgactgcattttctaacaaattagttaacacgcgctcaattaacagactatcgcaatagagtaataaatcagctggaatatcaatttgtaatgggtgtttatcaagtaaataagagagtgaacgtactgcacttccagcaatttcttgcagtaaattccactgcaagttgacttggatccccccagattgaatacgtgccatatccagtaaattgttgactaagcgggaggtcgtcaaaatttgttggcggatctgactaacttgttcagtatgagcagagccctcagcacttaagtctagaagaagaatttcagactggccaaacaggacggtaagtggtgtttttagatcatgagaaagggcggctaagagcgcatttcttaattgttctcgttctatattaatacgagattgttcggccatttccgcctgttgtaaccgttcaagagcattggcaattaggccattaaatgtctgtaggagttgctgttgttcaggaataagtacttggcgtagattatttggctcaatcgctaaaatcgctaatacttgttgagatgcgctaatagggtgcaactgataagggacactaggtagggtatccgttcctgcacctgcgatttgatctttatcccaacaccaacgggcaataccactatcaatgggaagttgtcccataccttcagcattgtatggcgttaattcaccatgatgattaggcattaataaacaaactttggcatcaaaagcacttgataagaaatgataactagtacgtaccacttcttctaaagtcagtgcccgactcagctctcgggtcatttcaaataaatgacgagtgcgttgttctctataacgagcaacccgggtttgataacgcattcccgcagttaaattacccaccactaacccaacaatgagcattacggaaaaagtcactaaatactgcatatctaatacagccagtgaaaaatgcggttgtacaaagaacaaatcaaagcttatcacattgattaaagcggcaaaaatagaaggacgacgaccaaaaaatagcgcgataagaacaacgcctaataaataaagagtaactaaattcgccttatctaacgctaacaaaaaagtacgtgaaaaaagcgtaatagctagacataaaccaatagctgttagataacctttaagattttggcgccatttatcattttgtggcacaaatgtttttgttttataacgcggctcttcttcatttaaagcgacactgataacatgcaagtcaggtgcataacgcgctaacctttctgcgaaacgcatacggacccaacgttttaaccattgccacttttgataggggcgttgaccgataatcaccttgcctaaattatgctctctggcatagcggatcaccgctttttccgcttgattatcagaaaggatcgccgttcttgcccctaggtgttgtgctaacttgagggaatgtaaaatagcacggcgtttatgctcacctatctgatgtagctttggtgtttcaacataaatagcatgccattggcaaccaaaagcagcagcataacgagcagcagtacgcactaatttatcatttcttccatgagcaccaagacaaaccattaaactatcagtagtatgccaaacaggcgtaccaccttggctatcacggaattcttttacttgggaatcaacgcgatctgccattcgtcttagggcaagctctcgtaatgcaatcaaattacctttacgaaaaaaatgctctattgcacgctctgcttgtcctgccagataaactttgccttcatttaagcgctgttgtaggtcgtctggtggtaagtcgaccataactacttcatcggcattatcaaagatataatcaggaatcgtctcttgaacgcgaatgccagtaatactaccaacaatatcattaagactttcaatatgttgtacattaatggtggttaaaacatcgatgcccgcatcaagtaactcttcaacatcttgccaacgttttggatgacgacatttatgtggattactaaaagccaattcatccattaagatcaccgcaggatgtcttgctaaggccgcatctaaattaaaggcagagagctttctaccacgataatgtaattttaatggcggtaataacggtaatccctcaagttgttgtgccgtttcttggcgctgatgggtttctacaaccccagctaagacatcaataccttgctgatgtaaacgttgagcttcttgtaacatggcgtaggttttacctacgccggcacaggcaccaaaaaagatctttaatcgtcctcgatggggtgctcgcgttaatgccagcaaatcatcaggagaagggcgttgccactgcggagcttgttccattttattacccgctcactggcatcttaataatattggcatgttacgtgcagcaggtttacctgataacgcaatccgctttattccttcccaaggagccagtgcggcattacaagagttagcttcagggggcgttgatattgtaacgtcttcattaggtgaggctgacagtatggtcaaagccggattagtcaaacatatggccattatgtctaatgaaaaatcggcattttatcctgatgttcctctctttaaagaagcaacaggttatgattgggatttacaagcatggaatatgttagttgcccctaaaggacttgataaagaagcacaagataagcttaccgcagcaatgaagaaagtttatgcttcaggtgaattagctgaatttgctaataaacaaggatttgaagtcattgaattgtatggtgatgatgcgacacaatttatggccaatgaagataaaaagtttggcgaaattataaaaaaataactgaggaaacggctgataatagccgtttttatgcctatgctaaatcgtcatatattatcatttatattttgcctatttggattatttcttattatttatagcgcctattcattaggtgattttagtgaatatggtgcggcttttatgccttcactaattggtggaggaatgattgttttttcattattagatatttttgcaaaaaagcagcaaatggatacacctttggtgacatggcatgaaataaaatttgtgttattaattattggtatcattctattttatgtgttttttgctgaataccttggttttattgttacgggatttattgttattgcaccgttaatgatgaaatacgcaaaagtaaaaccaatatttagttttattatttctgctggaattgtattaggcgtttattatttatttaccgctgtactgttagtaccgctacctcaattattttaataaatagagaaaaacagtatggatatatttattagcgcattagcttatattgattacacgacaatacttgttgtcataggcgcttgcttatttggtttatttgttggagcaattccggggttaacatcaaccatggcaattgctttaatggtgccttttactttctttcttgatccaattcctgcattagcactgatgatctccgtaggtgcatcctcgatatttgccggcgatattccaggggcattattaaatattcccggaacacccgcctctgcagcttatactaacgatgctcatacattggttaaagaaggtaaaactaatcgtgtattagggatgtcattaacaagctccgttattggtggggtgatcggcacaattattttagcgtcaaccgctccgttattagccgagtttgcacttaaatttagctcttacgaatatatgtggcttactttaattggattaagctgcgccactattgtttctggcgctcaaattagaaaaagtttgctagcactgtttttcggtattgctttagccactattggctacgatgaatttacaggacaagcccgttttacctttggtgaagtctctttaatgcaaggtgttagttttattcccgccatgatagggctatttgctatctctggtgcgattaaatattacgtcgatcgctggaaagaaaagcaaattaaattagcagttaatacagataatagctcatataatatttttaaagggctgggaaaggttgtttgccaacgtaaagggggcattttccgtagtggtattattggtacattgataggtgctttacccggtgctggtgccgatatcgctgcgtggatctcttatgcggtatctaaaaaattatcaaaaaaaccgcaaaagtatgggcaaggctcagaagaaggtattgttgatgcatcagcaagtaataatgctagtttagcaggaagttggataccttcattggtttttggtattcccggtgattccgcggcagctattatcattggtgtattgtatatgaaagatatgcaacctggaccaactctctttttatttaatccagataaactgtacgccgtttttatcattttctttattgcgaatttaatcttattacctatagcttttattgttgttaattttttaaagaaaattgttgctattgataatgcaattctttatccagcaattattttatttagtattgtcggttcatttgctattaccaatacgatgtcatccattgtggttatgatggtgatgggagttatcggctattttcttcaacagcgtaactttcctatctcaccgattatattagggatgattttagggccgatgctagagaagaatttactttcttcgttgatgaaatcggacggagagctaattaattttgttaatagacctatttcaattgtattagccagtgttttcctattaattgtcgctatgcaaattaggagcgcatttaaaaccaaataactaataagctatttattattttcaaaaaatatacacatattctatccaataccagggaaaatgcttcttaaataattaatttttaatttaagagggcaatatccgtagataaataaaaatatcgggtgtttttatgaaaaagatattaaataaaccagaaaattatgttgatgaaacattagctggcttatgccttgcacataatgatatttatcgtcaaccacaaccacgtttaattacgcgagctaacagctcagataaagctaaagtgggaattgttactggcggaggatcagggcaccttcccgttttcaccggatatgtaggtgaaggtttattagatgccgccgcagtcggtgatgtatttgcctcaccgtcagcagatctaatggctgatgcgatacgcgctgcggataatgggcagggggtattactgctctatggtaattatggtggcgatattatgaattttgatatggcctctgaaacggtagattttgaagataatattcgatgtacaacggtgttagcgacagatgatattgcttctgcaacaccagaagaagcgcataaacgtcgtggtgtggctggaatgatttatggttttaaaatggcaggggccaaagctcaagaaggggcatctcttgatgaggtgacccgcattgctcaaaaaaccatggaaaacacgcgaacaataggctgtgccttaacatcttgcaccttacccgctgttggacatcctacctttgaaatagctgacgatgaaatggaaatgggaatggggatccacggtgaaccaggaatttggcgcgataaattacgtagtgcagatgatattgcagaagaaatgtttcaacgtttacaaaccgaattatcactaaaaaagggtgataaagtctcagtactagtcaattcgttaggtgcaacgcctttagaagaactctatattttatataataaagttgttcaacttattgataatacaggggcgactatcattcacccattagtcggccgttatgcaacatcaatggaaatgaccggtgctagcttaactttttgtaaacttgatgatgagcttgaagctttattgaatgcacctgcacactgtgcattttggagagtgtgatgatgactaatattacactcgataatataaaacttgcagtacaacgtatcgcaattgcctgtgaacagtctcaaaatagactatgtgaagcagatagccaacttggtgacggtgatttaggggtaaccatgcaaaaaggatggcgacaaattgctaacgatgcccaagattggcctgacgatttaagcaaagcgctttttcaatgcagcaaatcattacaaaaagcctgtgcgtcttcttttggtactttgcaagcaacggcttttatggcaatggccaaatattgcaaagaaaaccacctgcaagaaatagcgcttactgatatttccccactattgacggtcgcataccaaagcatgatggcgagaggaaaaggggaattagggcaaaagtcagtattagatattctttatcatttatctgaagatctagcgtcaatctcatctctgactgaactaaaacccaccgctttaaaaagtattaataatacgctaaatgaatttcgccctaagcctaatttattgggacgtgcccgtatgttcccagaaaaatcgataggattagacgatcccggaatgttagcgattaacgttattgttgaagcaatttgattgaataaataaaaggctcttacatgaaaaaattatttggcgttacagtggcgatggttactccgtttgattcaaatgatcatgtggacatcaacgcgttgtctgcattaactaatatgttgatcactaaaggtgttgattgcctttatccttgtggcacgaccggagaaatgttgcgtttatctgcatcagagcgtaaaagtgtggcacaaaccgtagtagagacggcaaataaacgtttacctgtttttattcatgttggcgcaatgacggtaacagaaaccattgaactcgccaaacatgctgtagaaattggtgccgatggtattggtgtagtgacgccacaattttttgctgccacagacagagaattagagcactattttgtgactatcgccaatagcgtaccagagaatttcccaatctatctttataacattccacaatgtgcggctaataatatcaagcctgaattagcggctaaaattcagcaacaatgcaaaaatgtgattggtataaaatacagttttgccgataacaatacgacacttggctatttagcggttacagataatttttcagtacttcatggctacgataaattattccttggtttattagatgcaggctgtgatggcacagtttcaggatgtgcctgtgttttccctgagccatttgtgaatatgtatcaagcctatattacgggtaattatcaagaagcgaagcactggcaacaattttgtgtgaaatttagtgatgctttgaaatcaggcgcgaacatggcgatatttaagtcagcattaactatgcgtggcttaaatggtggtcatatgcgtttacctcaacttgatttattacctgaagaaaaccaacaattgaaagaagatctaacgcaattatgcaaagaagcggggatcgctttttcaattaattaacagagactcagcttcaaaatatctttattatattaagcagtataaaaaacaagctatactgcttttttataataaataacatctatttattcaattatttttgtgataaaaaatgaccatattgcataatatcgacattgccaccactgataataatgccaatttttttgccttttaacttatcaccaaattgacgagctgcagctaaacttaaacagcctgtaggctctacaatgattttcattctctgagcataaaattgcatagcagaaattagttcttcatctgttgctgttaaaatatcgtctacgttgttgcgaatgatctcaaaagtataatcgcctaaatgctgagtttgtgcgccatctgcaatagtttttggcgtatcaatataaattatctcacctttgcgtaatgattgttgtccgtcatttcccgctaaaggctcaacaccaaaaattctacaatgtggcgaaagggctttggttgataataatgaacctgaaagtaaaccacctccccctaagggaacaaacagcatatctaactcaccaacttcctcgaataactctttagctgcagtaccttgaccggcaataacgtgaggatgatcgtaaggtggtattaaagttaatccttcttcttgagcaagtttttgtcctatctcttcgcgatcttgtgtataacggttatatagaatgactctaccaccataaccttttgttgcttgcatcttagcggtgggggcatcttcaggcatgataattgtagctggaatacctaataattttgccgatagtgcaatagcttgagcatgattacctgatgaaaaagttatcacaccatttttgcgttgttcgcccgtaaattgtgataatgcattcattgctccgcgaaatttaaaagcgcctatgcgctgaaagttttcgcatttaaaatagaattgagcacccgttaactcattaatagtgcgagaggttaagataggtgttttattaagatatggcaaaatacgttgatgtgcttcaaccacatctgggtaagtaggaagcgctaatttattcataaagtttgctccttgatcaccatggcttcaatttcaattttactgccaaaatgaagctcttttacgcccgcgactaatctggccggtttatgctcaccaatccattttgcatataactcattgacaacaggccattcgttaatgtctgtaatatacatcttaacttgggcaatatcggttttttgtgcttttattcctataaggcaagcgtttaaattttcaagcacttgattaatttgaaattcaataggtttatccgttaatggcacgccgtttttatctaaaggtaataggcctgaaataaaggacatattattggctgtaacaacatgagagtagtgaccccctggcgatgtaagagcttcaatattttgcatcacaagatgtgaactcatagtattttcctatttcactctggttagattaaatgtataacaacttatacattatgtctaactctagatcaatagtgtagttttagctagtaaatcaaataataaatacgaggaaattgacgatagctatgatagctatatagaaagtagttattagcaaggtaaaattaatcgccactgtttggagggaaagtaatggcttaatggtgttattttaacatagataacatagcattagcatttgctttgtcgtaggccttttaaaggttgaaagaaggttcaataacttgattgagccttcttaatgtatgcggttattcgttaataaagcttaaatagttaaaaagtggcttaaaaccaaatttacgatatagcgctagaccatccgctgacgcatctaagaaacaacgctcgacaccttgctctcgacaaaactctaatacgtgagtaattaaatgtgtggcataaccattgccttgataggcaatatccgtcccaatatcgtcaaatcttgctagtttatcatgtaatgtcagcgttaatgatgatacaggctgccctgcaactaataatgcataatgaaggatcgtcgcaccattatctaacgctttttggtgataacgaatatattcattagttatcgtatcgtcaccaacaggaaaggcggttttcaatggttgcgcccactgtttaagatcatggttagttaaaataatatcgcacgggttatttttataggggggataagtcgcatcagacaatgagagatacatagcggttgtcataccgtcacccgtataacctgctttttttattatctcttcaaattcaggcaacagagattccggcagaaccagcatgtgaccttttttttgcgaggagaacagcgtacttgcttgttggaaagtattttcgctagcgccttgacgaagatagataaaattaaaaataggcgcgtccatcggtgtcataaagcagtgggtatgatcaccaatacgaatattgttttcacatatctctgaccaaaacgctttttctataattttaaactctttatacagttgtgcatccataatagttctctagataaatcatgataagcgataagaggctaacagaggatccgcttgtgtagattaatttggttcaacttactcacctaataaaagtgacagtgtcaccaatgtgtctgttgctacatgtaaatcttttagcaaatagggcatcgggctataatcgatgttccatctttagtagtcgttgctgagcaattatagcctttttatcatacgttttccggtatcactaaagttaccataaaaagtcatcttagtggcttagcatttgctcagggtgatgtatatcactaatttcaatgtaatatgtgtaagattacgttatcggtaatctacaatagggatagatctactaaagaataatcactttggtaaatccttgtgaatattatactcactttatgtgctaaaaaatgcaaaatttataaaaaataattatttttcataaagatatatagttatttctatataaaaaatagcttataactatgactctcatcacaaaaagataaatagactataacatcgcggatacaataggttgttcctcccataaatagctaaaaaaccagccaataattcttatttaaatgctttattaagaattttatctatataaaaaaagcaatttcagcaccatactattacctgcattcaaaccagtcatataatccaaatataaataaaaaaatgaatcattagactatatttaagctctaaaaccagtttaatttacttatttatcgttaaatataagtttattgttttacaaaaaaattaatatcgatatgatagcccacatatacagcatattatttttttaaaaaaggcgtcatatgttagaaagtattggtatttcaaatatttggacataccttttaggcgttatttttattacactagtaccaggtccaaattcaattttcgtcctaacttcgagtgcgaagcatggcgtaaaaggggggtataaagccgctcttggtgtttttacgggtgatgcattattaatctttttggcatttttgggggttgcttcattagtcaagacttcacccgttttctttattgtgatcaagtatgccggtgcactttatttaacctatttaggtttaaaaacactctatgcgacattccataagaaaaaagagcagccggaacaggttgcagtagaggttgtaaaagcgaaaaacggcttatatatcaaagcgcttttcttaagtttgttaaatccaaaaatgatcatcttttatgtgtcattttttattcaatttattgatcctaaatatgaaaatgcaggggttcccttttttgtattaggtgtaatattagaaatatgtagcatgctttacttatctgtacttatttttggtggcgttgctattactaataaagttaagcataacaaacgattagcatcattatcgaatagttgcattggtgctttgttcttattatttggtgccaaactcgctttaacggcttaatagattgatgagattgatgaaaaggtcacattttatggtgaccttttttttatacgaaatttgtatatgatgaagaatgagctaaatgataacaaggccaccttatgaaaaataccattgtaaaagatctgaaaacactggaagagatttatggtcaacctgccgaaccatcggtcttaaaagaagtggattttattcaccccctttatcgcccttatattgaagctacaccatttgttgcattagccacttatagtgctgatggtatggatgtttctcctcgtggcgatgagccaggttttattcatattgaagacgatcatactttattattacccgatagacgtggtaataaccgcattgatagcatgcgcaatttgttaattaatcccgcgattgctttattagtgctagtccccggcattaatgaaacattacgaattaatggtcatgcggaaattttaatagatgaagaaacactcgcacgctttaaatataacaatgcactacctcgctctgtcttgcgcatccatgttgagcgcgtatttttccaatgtggtagggcacttattcgttcaggtttgtgggaaaacaaatatttagctgataaatcaactattccagcaccgggacaaatattgaaatccatttctcatcaacaatttgatggtgataaatatgatgcacaattgcctgaacgtattatgaaaacattatattaatcatatagtttgctctttttatattaacatttgctaaaaagagcaagaaacagagtgcataatggggggaagtgcacgctatactgttttaataaataccttaattagtagcgtgattttatgtattttcagtatggtgaaaaagagatctcttttttaaaacaaaaagataagcgtctagccgcggtgatggaaagaataggggaaattaaacgtccacttacccctgatttatttacagcattaattaaaaatattattgaacagcaaatttctgttgcggctgccaccacggttcagcaacgtttacttaccctatgtgatggtatttatactcctgtacatattgctagtttatcagtgcaagatattcagcaatgtggaatgacaatgcgtaaagccggttatattaaaggtatcgcagactcagttataaatcatacgttagatttagaccaaatccccgctatgtctgataaagcggtgatcaataccctaataaaattaaaaggtattggcatttggaccgctgaaatgttattaatttcatcacttaatcgtcctgatattttaagttggggggatttagctattcagcgtggtatcatgcgtttatatcgccatcaaagcttagatagaacacgctttgaacgctatcgtaaacgttattctccttatggttcaacggcttcactctatttatgggcattatctaaagaaagcgcagactaaagagcaataatcggagtgatctaaatagaagtttattgataatggacttcatccagcatacataaatgtaggaactaaaatggaaaagagacattatcaacttattgaacaagcctgccgttttattgaagaaaatcagggtgatgtttctcttgccgacatcgccgcacatattcaatccagcccatattatttccatcgacgatttaaatctataatgggaattacacctaaagagtatgcgaatgcttatcggcacaaactaattaagaaagcattagctggcgataaaacaattacagatgcgatatatcaatcaggctttaatgcgaatagccgattttatgaaaatgcgacagccatattaggtatgacgccaacccattggcgcaatggtggacaaaatatcgtgattttttttgctgtagggatctgctcattaggccatatccttgtagctcaaagtgaaaagggcatttgtgcgataacacttggcgatgatcctgcgtgtttattagaagaattacaaaaacaatttcctcaagctgaacttgttggtgcaaaccaagagtttgaaaaattggttgcccaagtcattggttttgttgaactgccaacacaacctttggcattaccacttgatattcaaggaacagtatttcaacaaaaagtttggcgggcattattagatattccttttggttgtaccatgacatatcaagaaattgctcaaaaaattggttcgccaaaatcttatcgagcagtggcgaatgcctgtgcatcaaataaactagcagtggcgatcccttgccatcgagttatcagacaaaatggtgaaatatctggatatcgttgggggattgagcgcaaagaaaaattattacaaagagaaaaatcccttcatcatcagcatgatagattggctattagcaagagcgattaaccgttataataaacataatatcaatttataacagatgaaataaaatggcatcaacagcgattgtaccaacagatattacattttttgagcgtttaatcccttcaattttagccggtattaaagtgatcacaattagggatgaagcagaaagccactataaaccaaacactattgttgatttattatctaatgaacatggcacttattatggaaagttacaaattatttctgtatcacccttaaattttaatgagataaatgaatttcatgctcaacaagagggtatgaatttgcctactttaaaggccttaattaaagacatttatcctacaacggaaaatctttatttaatagaatataaattaatacaataagtagttctctcttattagttaataccaataaaagcggaggggttcctccgctttgtattataacttaaaatcaatagggtaatcgttagaaaaattaagctaaatcaagttgctgctttaagatctctatttctgcttgccattgagcctgtaatataggcttttgatgagcagattttcttgctaaatcagcattcaatttatcttcaagtgctatcaatttcattagcaattcatcttcattatgatgttttactatttcaacagatggagcatgatggccattttgctcattagagaccaatgacatatcttgttgagaaataagctgataaattgtttcaatatcatgatgttcgctaagaataccattgtgaatataccaaaaacgattacagcttttctctatcaattctctatcatggctgacgagtaaaattccccctgaaaattgttgaatttgctcagctaatgcctgtttaccttccatatcaagatggtttgttggttcatctagcattaataatgaatattttgccaaactgagaccaataaaaagtaaacgagctcgttcaccaccacttaatgactttacttgctgattatggcgagaataaacaaaacctgcatttattaatgccattttcctttgctcatctaatagcggtgcaaagggctttagtgcatcggcaagggtatcattatcattaagttgtgcgagactttgatcgtaataacctaactcaactctgggatgcagcctgatcacattttctgttgatgtggttgaaccatgaaatgatgaccaaatcatttttaataatgatgacttacctgtcccattagcaccaacaatagcgactcgatcaccacttttgatccgttgattatcgatggtatataaaatcggtgcatctggcgcagggatcactgaaagctgatgcagctcaagcaatctatctgcccgtaatattgttcctgataactgtaacgtccattgattgccttctgttacatcgacttgttcgtcttttaaacgaacaatttgtttttccatttgtttggctttacgtgacaaactttcgttatcatacacttttccccagatggccaattgcttcgcactttgtgcaatacgatctatctctttttgttgtgcatcacaacgatgttgcgcactgatatcttgtgcttcttgctcttgtcttgcctgagagcagggcaagcgaaaaacagatagggttttatcacgaatgatccacgtacaattggtcactttatctaacaacctattgtcatgtgaaaccagaataaaacttcctcgccactgtgttaaaaatgtttctaaccacaagatagtcggtagatctaagtggttacttggctcatctaatagcagtaagtctggttgcaaaatcaatgctctcgcaagtaataaacgagtatgttgaccaccacttaattgtgagactaatagattgatttcattggttttaaatcccatttcacttaataataattcactgcgccaactttcagatatgcgtagctcttcaggtaatttatgaagaaccgcatcaatgagacgcattgactgtagctcacttggtaactgttgttcgacataagccataatgacttgattggcgatagtaatagagccatctgttggtattaattggtgtgataaaagttttaatagtgtactttttccacaaccgttgtagccaattaaaccaattttctcacctttagtgagggccaaagaaatattactcagcaatataccgtgattattatgaaaagagagattttgtgtagataataatgtgctcatagcttactcattttttaagcataaaaatgctttgggtaatatcacgcgataacccagtaagctgaggagaggtaatagttaacgtcgctcaggcaggttaacgcagtaaagaactgtgaaagcctgagctatggcgattaccaaagaagtgtgagtattcaataagatcacacaacaacataattagcctccttttaaaatttatcagttaatcggtaaagtgagtttagcaagacaggtttattgattgcaagaatgcaatgatgagaaaccgtgtctttttgtgtgaaagaggagggaataggcgttgctgaattaatatcaaaaatagttattttttgcacactaaatcatagaatttcatcattttatcgtaaattttcctagataagaactatctccctacattgcgtgtttttatcatgatatattgctatttattcgctatagctgtcctataaaaggttagaaaatgagtaaattaagagtcgctattatttttggtggaaaatcaaccgagcaccaagtttcattacaatcagcaaaaaatattatcaatgaattagatcgaacgaaattcgacctttgtttaattgggattaatgaacaagggcaatggcatgaatatgctgaagacaattatttaattaatagcgataacccctcaactatctcattaagccaacctttgcgtccagtggctattattcctggcagtacccgtcagcaatttatctctttaactgatgggcaacctcttgcacaaatagatgttgtatttcctattgtgcatggtgcttatggtgaagatggcaccctacaaggactattacatatgattgatatgccatatgtaggccctaatatcatgagttctgccgcatgtatggataaagatatcactaagcgcttactggatgatgcaggattagcggttgcaccatttattacactgatggctcaccaattaaatgatatttcctataatgaagttgttgaacaattagggctccctttatttattaaaccagcaaatttaggttcttctgttggtatcagcaaagtcaataatgaagccgagtttaatgctgccttatccatggcatttgaatatgatctaaaagtgattatcgaaagtgctattgttggccgtgaaatagagtgtgccgttttaggtaatgaagagcctgaagttagcccttgtggtgaaattgttttaaatgatgctttttatgcttataacacaaaatacattgatgatgatggtgcaaaagtagtagtacctgctgatttagataatgcgattagcttacatattcgccaaacggcattgaaagcttaccaagttttaaactgtttaggtatgtcgcgcgttgatgtgtttttaactgaagataatcaagtcattatcaacgaaattaatactttaccaggtttcactaatatcagtatgtatcctaaactgtggcaaagtacgggattagattatcaatcactcatcacgaaattaattgaattagcgctagagcatcataaaaaaacagccgtattaaaaactaagtgtgagctttaatcacaataatactctaatagcgaagtgaggttcagatgaaaattacacaccttgatcatttagtattaaccgtggctgatatcgaggcgagttgtcatttttatcataatgtattgggttttgagataattacctttaaacaagggcgtaaagcccttgcttttggtcatcaaaaaatcaatcttcatcagctaggaaaagagtttttgcctaaagctgctaaaccaacggcaggctctgcggatttatgttttattactgaaacgccattgttagacgtgatagagcatataaagcagcagggtatcaatatagaagagggtcctgtaccaagaacaggggctacagggcctattatgtcagtttacttacgtgatccagataataacttattggaaattgctaatattattgaatagattaaccacatattctaaataaaatataataatatttagctaaaaagctataagtgttctttttagcttaaagattttaaattatttatattaaaaaaatgaaccctccaaatatgatagtaataaatagacctatttgtggctattttcgcctgattaaaataaaaattaatagatataatttaatgatatagcctttcttattataataatgttagcattattcaattatttttcaggtaacaatggatggtatgatgaaaaaagttatttttgtaagtgcaatatcaggggggatcttattttggtcaatacatttacaagcggataattttgattgtcgtaatgcggaaacacaaacagaaattaaccaatgtgcataccaagattttcaacaaaaagatgaagagctgtcacaaatttatcaacaatattatgtgaaattagaaactaaacgacaacaacagttacagcatgcacagtcagtttggatgacatttcgtgacctctcatgtcaatatgaggcagactattaccaaggtggcagtttggctccgatggtttacagtagctgcttaaaagataaaaccatagaaagaattaatgatctgaaaaactatattgccttatattaagactaaagaacttcttatcttgaaaataggctactcattttaaaagtattgttttttatcaaaatctatcgtttttagttatataaaattattatttttgtattattttgaaacattaaataacttgactaatcccacctgtaaagtactctaaattataaagtagcaattaaaaatagaagatatgatatgaatataatgacgaaattaggcgcagcagtattgcttacatccttatccactattgctatttctgcagatataaaactaacatacggtattaatttgattgattttaacggtgatggtgtaaaagatatagtcgttaaatctaagcgtatattaaatgatgcatcatcaattaatatggtcacggtttatataaaagatgcagatgaacaagtttatattgtaccttcaatttatgataatgctcttagcttatttgataataaagctgaaaacagcaatattaaaatctctaatttcaaatttatagagaaaaaaaatcaagtgatcttagtgagcggtgagaaaataggtaatgatatgttacaatcaacacctatacgtttttcaagttacactatcacgaaacaagataaacaatataaatgggcattttctgcatattgcgtaaccaattctacttatcttaatgttgatgatgcttttgttgatccctgcataaataaattaattcgaaattgatacacgcgtaggttgtaaatacgttgactttattgaattatttttatctttaatatcaattaattatcttattccctctcatatacctctctttatatagtacgatcacttgtatcatttggcattccttgttattaatctacacttaggatatttcttaatcatcaatatgctgataattttgtgtttgtcatgttccgtttttaagagggagttatgaaggaaattattacaggtttgcttctagcctcaataagcttattttctgtctcttgttcgcaagaagatacagatgtcgtcaaagtagcaatcaatactggaccagaccaagtcatttgggatgaagtgatccgtttagctaaacttaccgaaggattaaatgttgaagttattgcatttaacgactatgaacgtcctaataaagccctagaaaatagagaagtagacgtaaatgtatttcaatctattccttatttacaatcagagataaaagcccacaattacaaatttcatattgccagcaaaacgtacatcttcccgttagcagcgtattctaagaaaataagcgatattagcgaactcgaatatggtgatgtggttgccatccctaatgaagcaagtatgaaagggcgagctttattattacttgcagaaaatcacctcatttctttaaaagagggggttggttttttaccttccgttgaagacattattgataatcctaatgccttgatatttcatgaagttgaaactcccatgttagttgaagcccttgatgatcctgaggttacgatggcggttatcaacaataatttttcctctcaaattggcttacttgctacccgcgacggtttaattatggagaataaacattcgccttatgccaatgttgttgttactcgtatagataatatgaatgatgaaaaaataaagaaattaattactgttttacattcaagacaagtcgaattaaaggtgcaagaaatgtataaaggggacgcggttaaggcgtggtagaacatatttcaggttaaaaaacaaacagttcaatataactatgagtttctatacctaataaaacaatctaacaatatgaagttttttcagtatgatgatagaaactttataattcataaatagtagaaataaaaaatgtctagttctcaactgaaaaaacaatatattggcgaacatcaattatctccagaaacgctaatgatgagctatggatacgatccattgttatcggaaggctctgtcaaacctcctgtatttttaacatcgacatttatttttaaaagtgcagaagaagggaaaaatttttttgatacggtaagtggaagaaaaccccttccagaaggagaaaaagcaggtttagtctattctcgttttaaccaacctaatagtgagatcgttgaggatagattagcagtttatgaaaacacagcatcatgtgtcctcttttcatcaggaatgtcagctattacaacgacattaatggcttttacacaacctggcgatgttattttacattctcaaccactttatggtggaacagaaacattaatagccaaaacattcgctaagttcggtattcaagcaacaccatttacagatggtttaaatttagcacatatccaatcgcaagctgaaatagctagccaaaaagggagagtcgcggtgatatttgccgaaactcctgccaatccaactaattcactggttgatattcaagcgttaaaaatcgttgcggataaattagaaacaagccaaggctatcgacctattattatttgcgataacaccttattaggacctgtttatcaacatcctatagagcaaggcgctgatatttcactctattcattaacaaaatatgtgggtggacattctgatttagtcgccggtgctgcaatgggatcacgcgagcttattaatcaagttcgcctattaagaggtgcaatagggacacaacttgatgcgcattcttgctggatgttaggccgctctttagaaacattgcaaattcgcatggaaaaagccaatcaaaatgcgctattagttgcacaatttctacgtgaccatgaaaaagtgaaagtgatccactatttaccttttgtagatgaaaatagtattgaaggtcaagtatttgctagacaatgcacaggcgcgggatcaacattctcctttgatattgttggtggtgaagcagaagcttttcgttttctcaatgcgatgaaaatatttaaattagcggtgagtttgggaggaaccgagtcattggcatgtcatcctggctctaccacacattcaggtgttcctatggaattacgccacaatataggtattcaagaaacaaccattcgtttatctattggtattgaaaatccttatgatcttattgctgacttatctcaagcattagatcatgtttaatggataaacaatagcaaaacaacggattataagatttataatccgttgttttttttgctttgctgttttttattgttgtttttgccattcacttttggttaaacgacaaataacttctgttcttatttcgtctaaatactccacatactgatctttaattatgtgatgatatttaaatccacacttttcttgtactcgcttcgagtttacattgtctgcaaaataaccacaccatagattatctaattgtagagtctcaaagctatgacaaataagcgctttcactgcttcaggaataagtcctttcccccaaaaaggagtaccaatccaataagaaatttcggcatcattatcccctatagggaaattgctctcatggcaaaaagataagccaattaaaccaatcgctttatcatcatcgagcaatgtgacagcataaacttcatcacgcataaatatagcctggataatttcggtactttcagcaacacttttatgtgctggccagccagcgatagggcctactcgcttatccctcgcataataatagaggctctctgcatctgatattcgccatggacgtaataataatcgttctgtttgtaattttttcatacaatttagctctgttataacttatgtttcattatgttaggatgatcgtattttaaagagagccaatataaaactgaatggattaattaaggtgttatcggtacttttgacaactaaatccattaatgctcttgtgattaacattgagatcattaaaaataaaaacagtagcaatatgcaatagagtgaataatttatgtttagtcaatcattattaaagttaaatatcccttcggagtatgccgttattggtgaaagcgatatgcataatgaattaggctatccattagcattatcttatgttgtggttattatttgtttagatggcagggctgttattaatatagattttcaaacaaaaaccattaaagcgaatgatatagtgatactcggtgatgatagaatggtcacattgcaacgtaaatcagctaattttcgtattttttattgttttcttaagaaatcttttgcctctgagatcgcttatgcactttcaaatagtttgtttacatttttgcatgaaaaccccatttgtcgcccttcaacggctcacttaaacgccataaacaattgggtggaacaattaaaatatatagataaaagttatactgatcatagaaagttaatgttgagagggcagttacaaaatcttttttttgcgataacagaattaataccatctcattattccttatctaaaaaagaattcagccgtaaagagcacttatgttggcaattttgggagttagttataaaacatagccaccagcacagagacgttgcctattatgcaaatcgccttagcatcacaccgttttatctatcacagctcactaaacaatattttaatgatgttcctaagacgctgattaataggcaagtaattcttaaaataaaagcgttattgacgcacactacgctatcagtaaatgagatcgccataaaactccattttgacgatccctcatatctatgccgttattttaagcgcgagactgattgttccttatctggatatcgccaacaatatcaacggcaataaaatatattaagcagctattcttttttcactgtagttcataccttgcagcatacaaagccaagctagtactgcgatccccattaaaatagcgaataacgaaatagggggcaaggttgtcaggatataaccactagcaagtggatttaatgcagcacctaaccaacctaaagattgtgcagagaaataacttgctttcattcctaacggcgcaatattatcgatcatcatatactcaccaggtgcataaatcagttcaccaaaggtaaatattgctatcgccattgcccagaaaattaaattatcacccgccagcataaagcccgctaatcctaagataaaaaagagtgtgcctaaggtcattaatttacgtagtctttcagcaaccacttgtttaccgacgatatattgtaatgagacgacaatggccgcattgacggggaggatcaccgcaatagcagattcagccaatttagcatcataaacaactaaaaggtattgcgaaatacacgaagcaaatgtaccaaaagttaatgtgccaaaaaaagttgaaagcacaaaccagcctaatgctttatcttttagcattattttcggatcccactttacactattttcttctgtggaatgctctaccactgaacgttgcacaaaacattggatcataaataaaggaatactggcggatattgccgctaaccaaaaaggtaattgggtaccatacattaataataatgtgccaataggtgggccaaccgtccatccgatattaataaaagtatagtttagtgaaaatattttaggctttgctgatattgataaagtttcagaaaaataagctttcaataccgtagaaaagactaaataggaacagttaataattgagaaaaagataaccactaaaatagtactattgaccattgggatagcagaaaatgcgataataaaggtaataatagaaaaaaccatataacgttttttttcaaatttatctgccagcataccaaaggcaaggctaaatactatccccgtagtcagtgaaatagacattgcgataccaatatcatcaacaggcaatttatattgtcgtgataagtatatcgccataaaaggcagtgttgcacctcttcctatagtcagaataagtgatgaaaagagtagtgcagttgtagaacgagatttttttgagaacatattatcattttaattatttgtattaatggattattgttgtgtttggtgattttctggtgaaaactgtccagctgtatatttatacataacttataaataactgtatagagataaaagctagaaaataaatttttttaaccactacctattttattatcccatttttgataacactgtttatcaaaaatatctctataacaataagttagttttctctagactaaatagtttgatataacccgatttagctaagaggcaaattatgtctattattcatcttgaatttgaaaagcctattgttgaattagacgagaaaatagatgcattacttgcatttaaacagtctcaagatgaaacaacggcagttgatatagacgaagaaatcgccaaacttcgccaaaaaagcctttcattaacacgctctatattttctgatttaggggattgggagatagtacagttagcacgtcatcctatgcgcccttatacattagattatatcaaagctatttttactgatttccaagagttggccggcgatcgtgcttatgctgatgataaagcgattgttgcagggttagcgcgtttagatagaaaaccagtgatgattatcggtcaacaaaaagggcgagacactaaagagaaagtaaaaagaaactttggtatgccatcaccagaaggttatcggaaagcattacgcctgatgaaaatggctgaacgcttccatttaccagtgattatttttattgactccgcgggtgcttatccgggggttggtgctgaagagcgggggcaatcagaagccatagcacgaaatattcttgaaatgtcccgattaaaaacaccgataatttgtacaataacaggggaaggtttttctggtggtgcattagcaataggtgtgggggatcgagtaaatatgttgcaatatagtacttatgctgccatatcgcccgaaggctgtgcctctattttatggaaaaatgctgataaagcacctattgccgcccaaaccatgggaatgacggcacctaaattacaggcattgggtattatagactcaattattcctgaaccattgggaggcgcacatcgccactaccagcaagtggctgaatttgtaaaaaaacagcttctcgcagatttaacagaattgaatagttattctaaagaaaaactgcttgaaaaacgttatcaaaaattaatgtcctatggttattgttaattcttttcaagtgagagagcaatcaatgttacactgcctatattcaatactccccatataggcagtatttttatgtcaattgaccttaatttattacgtattttttctgcggttgcagagcaagcacagtttgccagtgctgcacgatcgctttctatgccaacatctaatgtcagcagggcaataaaacagctagaacaacagcttaactgccgattaattgatagaaccacgcgaaaaatgcgtttaactgagcaagggaaaatcttgtatcagcaagccaaaaagaccttatatgaattagataatgttgtagaacatataacgagtgatggcccattaacaggaacctttagacttacgatacccagtgaatatggtagtgagttacttgccgatattttagcggattttgctgcacttcatcctaacttaaccattcaatgtgatacgcagctaatgccaagaaatgttatagaagatgatattgatttacttctaacatttcatcgtggccaattagccgatagtagctaccattcacgtctcataaagtcgtggcgtagtattgttgttgcctcagagagcttattagcaaaaacgggtatccctacagatattgaacaactaagccaattaccttgtatttccagtttaagtgcattagaagggcaaccgtggatctttattgataaagagcagaaccctgtaaaagtgacaattaatagctgttatcgtgtaaatagtgctatcttagccaaagctgccgtattaaaaggtttaggttttgctattttagctgaacattgttgccttgatgcgataaaggcaggcaaattgcgagctatttcttttcctcaacagcccgcatcaattagtttagtcgcgatatatgcaagtcgtcgttcgctttcacgtaatattgaacattttcttgcatttttaactcagcgtttataataattaatccgctatctgctgagaaagtgcaccttgtttctctttgcaaggaaaaagcataataaacagagtaataaaacaggaaagccctgcggttagcatggcataggcaaatcctgaattaaatgcttcaggtaatagggcaaccaactgattatctagggaagcggttttattttctgttactaacgtaataatattaatcggttctgccactattcctaatgcttgactttgtatcatcatataattaattgcttgctgtatcattaatgtacctaataacgcaattcccattgtcataccggtttgtcttaatgcattcatggttgcagacgccatgcccgagcgggacggtgctacacttttcatcactaaaacccctattgcgggtgtcgctaatcccattcctgcacctaagataaataaatagcttcctgttattgtgtaagagctatttgttgctaatgttgccaataaacaagaagatattgcaatcaacaaaaagccaaagatcattaattttctgacagatatataacgagagaaccgtccaaataacatagaaaaaagagccatggcgataaactcaggagccattcttaaacctgtttctaatgcactccagccttgtgctttttgtaggaaaaaagcgataaaaaagacattactataagtggcaaatcccaaagtaaaagaggaaaggttatattggaaaaacgagcgatctttaaataacgatagcggtaataacgggcgttcaatacgtttttcgactataacaaacagggtaataaaaatcagaccgacaattaatgcgaatacagtacgataatcagaccaacctacagagccagcttcaataaaaccataggttagtaaacctaatcccaagatactggttaattgtcctaggggatctaacgcaacatcctcaggatcggcactttcacttaatccataccagcctagtaatactgtaatagcaccaataggaatattaataagaaatatacttgcccaaccactggcatgaactaatgcaccaccaaggatagggccaataatcagtgataatgcactaaccgaagaccaaataccaataatacggatacgttcaatatcaacaggaaaggcatgtgtaataagtgataatgcgccaggaataagggctgcagctgcaataccttgaataatacgcccaaggattaatatttcatgttgttgtgcaatagcacagataagggagcctagagtgaaaataatcaccccccagagccacactttttttcgtccgaaacgatcacttaatggcccggaagacaaaatacaagctgatagacatagtgcataagcatccacaatccactgtaatgtagccatattggcattaatatcattctgaatagtaggtagagcaacattgacgatactaatatcaagagtggccataaatgtgcctaaacagatagcacaaataagtgacaaccgttttgtataactcataagttttattacctttatggtgaaataatagtagtatcataatatccgactgaccgtcggtcaatcaattgatgataataagtttcatttacggttattgtggctattctcaatatggagtaccctttaacagccacttagagggagatgagcaatgtcattagaagaaaaaaatatcgataaaccaagaacaaagccagccgaagttcgtttagaagagttaatgaacgccgcagaaacactatttcttgaaaaaggatttgatgccacaaccgtcagcgatattgtaaaacaagcgggggtcgctaaaggaacgtattatcactattttacggcaaaaacagatattctcgacgcactgcgaactcgatatatggattggtatattgataaagttgagcaagcaatggcaagctgccaaattcaagattttcgcgctaaattaaaacagtggtgtgaaactagcgttattgcttatgttgaaaaacaagaattacacgatatgctttttcatcaagtctttcatcaaagcggtaatattcatgaaaatagagcgctacagcagttacaaaagatattaatgggggggacagagaataaaacgtggcaagtcctacagcctgaattaacctgcacgcttatttatcatggtatgcatgctgccgttgataatttagaacacagtacggaatacacatcacaaacattaggtgcgctattatatcgacaatttacacaattattaagttaaccagactattaaataatgaatattcgggttgttgatataaaataagcgtgacactgtcacaaaaaagaaaattgggcgcgattaacaaccgaaatcatttgtggtgtttctaatattgttgcatcacttttatacggttgtctgtttcttagcaacataaccataaggtaggacttcaaaagagcaacatgataatttcatcaaaaatgaaaggggattatgattgactcgtggttggtaacatacaacaacagaatgttaaatttcaaacaaaaaaacatgtattaatctttatatatttaaataccacatgaaattaatattacctatatttttaatataatgatgtaattaaaagataaaataaaatattttcccaatataaataaagagaagcatttcaattaatatgtaattatcattaaggtgttatatgagtaaattaacaattggtggagtaaatatatcaacttcgcaaataaacaaattatcacacgcatctaaagctagagatgcaatgtctatttgggaaaaaataaaagactggtttaatcatggtcaaaaagaacatgtgcttaacttactttatcatacctatttcaatcctaaaaattcaatatttgataaggttgatagctttgcagaattatattctatgacaggggcgcaatataaagataattttcatttatatttaaaagatggttatgatttaaaaatgaaatttgttataaaaaacgtttataatggtgaggtatcattagataatttaattaaagacatgatagatcggatacataataaaaatccaagtataaaagaagatatagaaaatataagaagttatataaaaaaaagactgcatgaaattcctaatgaagccaattatgatattaatcaatacaatgtctatttatcccagataaaaaacgacttactaccaaataattattttaacgtagagcgttatttggatggtgtaacagattttgttcgtttatataatataaataattctagaattagtgtagacgataaaattgaagaccgttgtaaattacaaaaacttatgaatataatacagcatattgatatagaatatagaaaaaatattcaaataaaacttgtgaagaatactgttgctttaaatataaaagataaaaattcaaaagagtttttgaatttaattaaaatcgaattattgtcattgtacaatcctcatgtaggtataatagaaggatttataaaacatggaatggaaactttatttaaagatgaagacaaaaaagaaaaagcctgtggatcattaaggaaagctattattgattataactatccatttattagaacacttgaattcaatgttactgatgagactataaataatatttatataaataatatagtaccaagtgagtatatctccttccgccaataaaaaacgcccataattacaatgaattaagtgacaatagctacagctataactctatctttaaataaaataaaggcttggaacgtaaaataacaccaagccttttattttttatattaataaataagtggggtactaaccatcaatccctttcttagccaagaactcatcataagtgccttggaaattagtcactttttcaggcgtaatttcaataattcggttagccaatgagctgacaaattcacgatcgtgagaaacaaaaattaacgtcccttgatagagttctaacgccatattcagtgactcaatagattccatatctaagtggttggtaggttcatccataatcagaacgtttggtttttgcatcattaatttaccaaacagcattctgcctttttcaccaccagataatactttgactgattttttaatatcatcttgtgagaaaagaaggcgacccaatacactacgcaccgactgttcatcatcttctggcttcatccataaactcatccaatcgaaaacggtcatatcaacttcaaaatcagtggcatgatcttgtgcataataacctatagtggcattttcagaccatttaacgcgtccattatcaggcgttaattcacccactaatgttttgatcatggttgatttacccacaccattggtgcctaaaatcgccactttttcgcccacttccagcatcatatttacgtctttaaataaaggcgcatttgcttcataacctttagcaatattctctacttctaaggcattacggaataatttcttctcttgctcaaaacgaataaagggattttgtcggctagaagctttgacttcggttaattgaattttttcaatttgttttgcacgcgaagtagcttgacgagattttgatgcattagcactaaagcggctaacaaaggattgtaattcactaatttgtgcttttttctttgcattatcagcgagtaaacgttcacgcgcttgtgttgccgctaacatatactcatcataattacctgggtgaactgttagtccaccataatcaagatcggccatatgagtacacaccatatttaaaaaatggcggtcatgggaaatgatgatcatagtgctattacgttcatttaatgtttgttctagccagcggatcgtatcaatatctaagttattcgtcggttcatcaagtaataagatgtcaggatcagcgaatagggcttgtgcaaggagcacacgtagtttccatcctggcgccacttcactcattgggccattatgttgctcaagtggaataccaacgtttaataataattcaccggcacgtgattcaacggtgtaaccgtccatttcaccgaatttcacttcaagatcggcaacacgtaaaccatcttcttcgctcatttccggtaagctataaatacgttcacgctcttgtttaatttcccataactcagcgtgccccataattaccgtatcaagcacggtaaactcttcataagcaaactgatcttgttttagcttacccaaacgctcattaggatcaaggaatacgttaccgctagtaggcgcgagatcaccaccgagaattttcataaaggtggatttaccgctgccgttagcaccgattaaaccatagcgattaccgccaccaaacttaacagaaatgttttcaaacagtggcttcgaaccaaactgcatagtgatattattacttattaacaagacgaatactcatgattagtgaatgataaagataatggggcggcattatgccataaacttaccccattaagacagtagagtaaggttagccgatgacttattttacgatatcatgcacttttacgcgttaatcacttaacacttaactcaaaaagactatgtgatttacctgctttaataacgatatgagtgggaatgtgttattttaataggattaattttcaaaaagaaacaatcaaagagagttactatgccgatatgggttgatgctgatgcctgtcctaaagttattaaagagatactttatcgggcagcagatagagaaaaagtggtgatcacttttgtggcaaatcagcgattaagtatacccgcatcgccttatttgcgcacattgcaggtttctgcaggttttgatgtggctgataatgaaattgtacaacgtgcaaaccaagatgatttggtgatcactgccgatattcctttagcggctgaagtgatcgaaaaaggggctattgcactcaatcctcgaggtgaacgttatacagagtcaacaatccgcgaacgattaaatattcgtgattttatggatacgatgagagcaagtggcattcaaacaggaggaccagcaagtttatcacagcgcgaccggcaactttttgctaatgagttggataaatggttactacagcaaaaacgtaaaaaataataaattatcaataaaataataaacttttgaatattcttaccatccgagaggtagttatgtcatttactaaatcaatgcttgcactcgctgttatggcggtttcttttactagtcacgcagccaaacaggctgatttaatgattgtcgatggcacagtgttaacaatggacgcacaaaatcaggttatcgaacaaggaacggttgttgtaaaagaaaataaaattatcgccgttggggggcctgagttaacacaagaataccaagccaacaaagtgttagatgtggatggtgatatcgtgatgccaggattaattaatacccacacacatgcatcaatgacggtttttcgctctttagccgatgacgtgccagaccgattacatcgttatattttccctttagaaaataaaatggtgtctcgcgatatggttcgcgtgggagcaaacctcgccaatgttgaaatggtaaaagggggagtaactacctatgttgatatgtattattttgaagatgaagtcgctaaaacggttgataagatgggaaatagagccatcttaggtgaatcagtgattaattttccggtggctgatgcacaaacccctgaagaaggcattcaatatgctgtcaattttattaatgaatataaagatcacccgcgcattattcctgcctttgcacctcatgcaccttataccaataccacagagaatctgcaaaaaattgctaaactctcggtagagcttgatgcccctgtgatgatccatttagcagaaaccgatagagagaaagaagaaattgcaaaacgaaccgatggtaaaagcccagttcaatatatggcagatattggcgctttaaataataaagtcattgccgctcatgcgattatggttgatgagcaagatattgatttattaaaaaaatatgatgtaggtgtggctcataatattagtgctaataccaaatcagccaaaggtgtttcgcccgttgttgccatgctagaaaaaggtgttcgtgttggtttagggactgacgggccaatgtcgagcaatacactcacaacgatgaatgagttaaatttagtaggcaaaattcataaattagagaataaagatcgcgccgcaatgccaccattaaccgtcgttgaaatggcaacaataggctcagccaaggcattacatatggaagataaattaggctctttagaatcgggaaaacttgctgatattattgttgttgatactaaagcacctaatatggtgcctatgtatagcccatatgcagcattagtttatggtgcgaatggaagtaatgttcgtcataccattgtagatggtaaaattttgatggaagatcgccaactgttaaccgtagatgaacaagcgattatcagtgaagctcaaaattttgcgaataaagtacgccaaaccgttgttgatagtggtgaagttgttaaatagattgtagtaatatagcgttaataagtttataaaaggtgatttgatatcaaatcaccttttttattttaaactatcagatatcggaggtttgttggttaatactttttcttattgtatttcttagccatataatttttgtattatggctattacgcttatgccataataaaacaaaaggtagatgaagctggtctaaaaacacaggggggagagggataggtaatgttacaatatcaggaaaatgtgttttcacataataacgacaatatcctggtgcacaagtaattaattgatggtcaggttgagatatcataaaaagagattgctcaaaagaagtataagtaattgctatctgacgacttttgttcatttcttttaagatattatccaaagcccaatgactttgtttgtcatattctgtactcacctgagaaaacgataaaaaattattaagatcccacttcattttcattaacggatgatttttgtgtagataaacgagtgggatatcatcaaataatatttcataatcaatcacatcaggaagtagctctagtaactcttttgagcgtgaatagtattctcgtccaacaagcccaatatcaacttctccatcaataatattagaaagggaattatattcccaattttttatctgaagtgtggattttgggtaatgagataatatttgttgtggtaaagaaggtaacatgacctgatgtaacggtgtttctaaaactaaattaaatttaagtccaacaggaacttctgtattacgtttattggctatatggtggctaatattaataaaatcagataaagaatcttcaatacttaacgataatggtgttgggatcaacccttgtggactacggataaaaagaggatcatcaaaccatatccttaatttggctaatgctttactcacagcagaaggagaaatggataaccacttagcggccaaggtgacactgcgctcctgtaaaagaatttgaaatatgactaacaaattcaaatcaattctatgtaatggtttgttagacattatatttaacctttttttgttctgtgaaccgaggaaagcatagaaaaagagtacctacaatacaactgataaataaaataaccaccaacatatttattgaggatacttcaatccaccccattacccaaatataaagtgaagaaaaacttaattgtgaaatacccagcacagagctcgcaacgccggctcgttggctaaatggagaaagtgcttggctcataataatcccaaataatagcgcaaatcctgagccgcataatgcaaaggtaataaaaaaccaacgcatatcactctttttccctataaaaaggaaaataatacctattccaaaacatataagccctactgataaaatatgcttatagcgatatttcattaatatttttggcattaaaaaagaaatagtcatacttatcattgctaatgatgtcattaatattgaatactctcctgttgaataattcatttgttgcatcactacaataggagaaatattgacataagtaagaataacggccattcctaagcatgaaataagtaaacgacttaaaaaatagtgagtaagaaaagactctgttgttggttttattacagatagatttacttttttaattttaatttcttttttatggtaggtttcttttattcccaaaaaacaaaagataaaaaccaatagggaataagcccccataagatagaacatcattgaccattcgcaatataatagaataataaagcctagaacgggagctaataccggaataatacaagtaataccatttatcatagaaagtactttagcacgttgttgttctgttaatgtatctcttaatatcgcaaaagtaacaacgtaacaaaaacctgacccactaccttgaaaaaatcgtgaaatcaagaactgtttttccgttatcgaaagcccagcacttaatgacgctaagaaaaaaatcagagtaccaaataaaataacaggcttacgacctaaattgtcactgcaccatccagcaattaacatggatgacaccattcccatcaaataaattgaaaatgcatggtgcaatgtcacttcagaagcatttaaatcgctagcaattgctgttaatccagttaagtatagatcaacaccaagaggataaatcaatactaaaaaaaaactaaaaataacatatttagtcataaaccacctcgttttagaaagtggcattctagtaactaaaaaaaataaaacctaatgataaaagagcaatcgcttatttccataatggaaataagcatgcttttagtttttatatcctttattttctacttatctttagggatatatactaaaattcgatttattttttatcctattttcttgcgtgggaattaatggttagcaaaccattgttcaacttcttcatagctacccgtatagataattttatcttgttttttacttaactggtaacgatacataggatcgtaatattcttttagtaaaggcgataaccatgaaaaatgcacttctgtattcgcacttattttttgtgcggctaaagcattatcaagtaattgggttaactccgcggctctttgagcacctaatcgacgtcgaatagcatacaatccatgatgcaaataatcactgtattcttgccaacctttttcttcaccatacgcttcaataaagtcatgagtcatacgatcaaaatattcttctttgagtcttgccatacgccgctcaaatggatcatccaccacaaccaaatgggctgttgccatttgtatacgcaaactttccggtaaaccattagcaccaatagcacggccttcgtcttcgagtacccagcgggaatgataggaggatttttttaacatatcgacagcaaggtagttttcgaaagtcgcttgagcaaactgagcctcaacagtgcgaccaaatgaggagcctcgatgatgagcgaatccttctaaatcaattccctctggtaaagagcgtactaaggttgttttaccattacctgtacaaccaccaattaagataatagggcgttgtactagctcattggtcatttcgatcgtcgcttgtcttaacgctttatatccaccttcaattaaaggataatcgatgcctatttcagctaaccatttttgaacaatgtgtgaacgcataccgccacgagcacagcaaataaatccggaaggaaaacgctcgcaagcctcgcgccaagcagcaacacgatgtgcttttatctcgcctttaactaattgatgccccaactctaccgctttttgagagccatgttgtttgtagcaagtccctacagccgcacgctcttcattattcattaaaggtagatttattgcgttgggcatcgctccttgattgaattctattggcgcacgaacatcaataatcggtgtttcattggcaaggagtcggcgtatattttgagcagaaagcgttgattccataataaaaactataatatctaaacaggcagaaagattgtctactatactcttaaaattacctaatagcacacacagagcacgtttttgtgagtaataaaatcaaactctatttaaccagcactgcggcattattttgaaaagcgtatttaaaataaagaaaattgaattgatcataaataattcaactacaataaccttatgctatttttagcaaaataatataagtcactttattacaactaaaaatattatagtattgatagctatgaatggatttaatcataaaatgataggtgcattaccttgaacttaataaaaaaacatcatcgaattatcagcttaactgtgatgactgtattgttgacgggctgttcacaagggcattctccttttattcctatgctaggtgcttattttccctattggatgttatgtacatttattggcctattaggtgctttttgtctacgggttttacttatctactggggaattgatgataaattgccagtacctttgttattttattttgcgattatgttatcaatttctttaactatctccttactttattttacttattaaactatggataaaaaaattaaaaaaagcctagcacgcgtgatcaccattattgtttttttgataacgctcattttattatggcaaagtattcatatatcggcattaaatcctcttagtgaagatgccatcattgatgcaaataaaattaatatctcagcctcggtgcctggacgcattgctgctgtttatgtcaaagaaaatagtaaagtcaaaaaaggcgatttactgtttacacttgatcccacaatgtacgcactcagggtagagcaagcaaaagagcaactacagattgcacaagcgacattaagcaataagcaacgtattattattgcggaaacatccaattcagaagtggcacaagagcaaataaaacgtgcgcaggtcaatttatcattagccacacaatcattaaatcgattagaacctttattagcaaaaggctttgtcacagcacaacaagtcgatgatgctcggacgttaaaacatgatgctgaagtgacattaaaacaagcacagaaacagaatgtggcatctgaagcacttattaataataccgattcagaagaagcattagtcaagtcattaaaaacatcgcttgccatggcagagtgggagttaagtaatactgaggtaagggcgccaagtaatggatatatcgcaggggtcgttttatctcccggtgaatttattttatcagggcaatctgtttttaccttaattgactctgatacttggtttgcttcggcctattttaaagagacagatttaaataatataaaaattggtagctgtgtggtgatttactccatgattgataatcaacaccccattaaaggtaaagttgaaggaattagtcggggggtcatgtcgaccgatctgattaatattccaagagacttaccttatgtacctaaatcattaaattgggtacgggttgagcagcgttttcctgtcaaagtcattattactgaaccaccagaagcactcatgcgcatcggtgccactgctactgtaaatattgtacctaacgatgatgactgttaaatcttcgctgatagcaaaacaagtcaaacaagatttattaccttttgactatcggttcgccactacgtggcgcatagcgttactgtgtgccttaatggccgtgatcgctatggtttatgaaatccctgaatcagcaatcagctgttatttaattatctatttgattaaagcggatgcggtacaaaatatattactctcccttggggtcattattttatgctccattgtggttggtgtggcgttagtactgtttaatctcactattcaaaatattattttacgcttcttttttatggcttttttctcagccatttttatgtatttagcttcagcaagtagtcttggtgatataggcaatttagttgctttggtgatcgcctttttaatgacgctaattgaagatatcccatttggtgatgctgcaaccagaggattgctttatgcgttattaatggccgtttcgccgatgctattggtgattatattcaattatttttttggtattagcccacggaaattactgcttaataaaatttcaacgcgctttatggcagcccatgattttttcttagggaaaaaaactaaccagataacgctgaatgaaatactaggaacacaagcagaatgccaacgttatttgatggttatgaaaatcctttatctattaggtaaagaagatatccaatggttagaaaacatggttgataactcctatgcaatattagttatgtcaataacaatggatgacaatacctcaacatcgttacgttttatgttagcgaaaagatgtaaatatattgcggactgttttgccaaccactcgttagataacattaaagatagtgtgcaacgtcttcagccaataaatagaatcgctttattggctaaatttaatactattttgctaacaaaacgaaccactaaacccattaaaaaagccacacccttttttgtaagcgatgcatttagtaatcctaatcataaatacttcgctattaaaacaactcttgccgctattttatgttatttgttttatgattattttaaatggcaaggtatccatacagcgatgatcacttgctatgtggttgcacttacttcagtgggcgaaacggttcataaacttacactaagaataatagggtgtctgattggcgcattaattggcatgatctcactgctttatattattcctaatatttctgatatttttcagttgatggtattgatcttcttctgtcttttacctgcagcctgggttgccgccggtaatgaacgtatctcttatgctggcgtacaagtaggcttagcctttttgctaacgacactacatggctttaaaccgagttttgatatggatgtggtttccgaccgtattttgggtattttattaggcaatattgttatgtatgtcatttttactcgagtctggcccgcgagtatcgtcaatacaatatacaaacagctcgccacgattttagatgactatacaaagttaagatgctctgccaataaaagtgagtgtttagatttagtcgcctctattaatgagactattgcacaatctaaagataatattgatttactgctgtttgagagaaaagataaagaaagaaacaaagtactcaccttgttttttaaacagtcattaagcaagatttcttacatcagtcgccatagttatgctgataggtttatttttgatgataatggagagtattccgatacactgcctttatctccagatgattttaaaaaaaatgtcttaactgaagaaataaaaatgttgcccatcaatgaaagagaacaagtatttaaacagttaataagagaaaatagatgatgataaaatcggccattaatcataaaaaatatattctatcatcgtggttaagtttattacttgttggatgtattgatactagcgattatgggaaatactcagcacaacaaccgatgccttataataatacaaactatatggcagcttctgagcaatacctcgccacacctcagcaagagcaaaccactaaaacgagctatggattggccgagcttatcgatcttggtcagcaaaataatcctgaaacacggattgcttggttattagcgaaaaaatcagccaccgatattggtatggtagaaagcacttatttgccgattattaccgcaacggcattggcaggctatcaaagaggaaaagtagatttacccgccaatccaattgttgatgatattaaaacatcaaacagtgcttttattccagcgttaacctttagatggcttatttttgacttcggcaaacgaggagctttagccgatgccgctaaacatgcttctttggcaacaaaccttaattttaatctgatgcatcaaaaaataattcatgatgtttctgttgcctattttagttatggtgcggcccttaaaaaagtcactcttacccaagaggcactgcaaagaagcaaagatattttatatgccatagagcaaaaacgtgcgcggggattagcaaccgtattagatgttgctttagccaaacaacaagttgcccaagtagaattacaacatgtgttagctaaaggtcatgaaaaagatcaatatcagttattactgtctgcaataggtgtctctccctttgaaaagataaaagtgaattatgataatgacgcgcgcttacctgatgatatttccccattgactcacgatgtgataaaaaaagcgttatcacaacgccctgatattttagctcactatgaattagagcaagcggcattaaaaacggcacgctctgttgaatctgactattttcctaaagtgtatctcgccggtgctcttgctggtggttcggggcattttgatgttcaggggttacctgaaattagccaacgaacttcatcgtcgaatattttaattggcgtgagtattcccttatatgaagggggcatgcgtcagtcgcgaatgagcaatgctcaatcagatatccaattagcacaagaaaatttgcgcaaaagccaagatacggcaatcaaagagatctctctcagtgagaatgcgttaagatcggcccttgaagcaaacaaagcggctaaaaatctcgttgataccgcacaattaagttataccgccagtgtcgatttttttaacaatggactaggtacagtaacggagattaataccgcagaaattgcactattaaatgcacaactctcacatatagatgcttatacaggctcattaattgccgcagtagatttagcctttgctttaggggatattgatcagggcttacctaatatacaccttgataaatagagataatcaccttataaaaagggctgcctatcaaataataaagcaatagagacttttgtgatctttgaaatcgccagaacaataatacattatggtttacattttttagcgccaatagcactcgcttatctattttggggtaaaaactggcggcttgctgcgcttcttatgatgagtacgatggcaatagacattgaccatttgtttgcaacgccaatctttgatcccaatcgttgcagtgttggttttcatccattgcatactctatgggctgccattgtctatatcgttttatggtttattccttcttggaaatggaaagccattgccgttgggtgcttatttcatctattaaccgattctgttgattgttatttaggtggtttaaaacctgatatggctataacaataagctgtaataaactttattcgccagaaacgccattcgaatattaaaagacaaaacaccacaatctggtagtaattacaataagcttgatgtagagtgctcagtcttttttttaacgaagtctagctgggaggcgatatgtttattggctttgactatggaacatcaaattgttctgtggcaataatgaaagaggggaaaccaacgctattacctttagaaggtgagaatgtttatattccatctactctttgtgcgccaacccgtgaatctgtttccgaacatttatttcgccacttaaatattaaacctaccaactctattggcgaacaactattaagaaaatcaatcgcgtttaatcgtgatgaagatattgaattagtgcctgaggatattgttttcggtcaggcggcattaagtttgtatctaaaagatccccgtgatgtttattacgtcaaatcgcctaaatcttttcttggtgcctcaggtttacatgagatacaaatcagcttttttgaagatttagtgtgcgccatgatggccaatataaaacaacaagcggaacaaagcacccaagaaaccattactgatgccatgattggtaaacctattaactttaatgggttagggggagaagctgctaataagcaagctgaacgtattttaattaatgcagctaaacgagccggctttaaacaggttttatttgaatttgaaccggtagccgctggtttagaatatgaatccacattaaccaaagaccaaacagtcttggtagttgatattggtggtggtacaacggactgctcattgattcaaatgggccctagctatcggggtaaaaccgatcgtgccagtacactattagcgcatagtggacaacgtgtgggtggtaatgatcttgatatttatctagcttttaaacagctaatgcctttatttggcatgacagggctaacttcatcgggcataaaattaccgctaaaacaattttgggatcctattgccatcaataatgttgaagcacaaaaagatttttattctcaacaaaatttagcggcattaaatcaactacgtcgtgatgctcaagagccagaaaagataaaacgcttaattgaagtctataatgaaacactaggatatggcattgtccgcaaagcggaagaggcgaaaatggcattatcagattgccatacctatttagccagcatcgcgttattaagcgaaacattagaaaccaatatcactcgccagcaaatggttgaagccattggctcccctaaagataagatgattgatttggtcaatgatgccgtacaacaagggggcgtagtacctgatgtggtgtttatgaccggaggctctgcgcgttcaccgattttatgtcaagctatcgagcaacagttacctaatgtgcctattgtaaaaggtaatgatttcggctcagtaaccgcaggattagcccgttggggtgaagtttgttttaaataggcggttttaaatcgctctatttttaaatatattagactcagcatgtggtgtttatttgataatttgtcaattaaaggccatatgcttttcttttatctataatagacagaccaaacacaacataaataggagtacacgtgtaccgcttccaaaatgattataatgaaattgcacatcctgcggtcatgaaggcaattacagatacagtaggtcaacgttatgatggttatggtatggataccctttgtcatcaagctaaagaattaatcaaacagcgaattaaacaacccgaagcgcagatccatttttttaatggtggcactatcactaatttaaccgctatttctcactttttacgcccacatcaagcagtaatttctgtcagcaccgggcatattgcgactcatgagacgggagcgattgaggcaacaggccataaagtgatcaccactttttctgctgatggtaaattgaccccagatttattgaggccgatcctcgctgaacataacgatgaacattgggtgcaacctaaacttgtttatataaccaatgccactgaaattggcacggtatatcgtaaagccgaattacaagcgttacgcgaattttgtgatgcacataatttatggttatatcttgatggtgcacgtttagcgacagggttgatgtctgataatagcgatctgacgattgaagatatcgcacacttaacagatgctttctatattggcggcacgaaaattggtgctatgtcagcagaagcattagtgatttgtcatcctgcattaaattctgattttcgctttagcttaaaacaaaagggcggattacaggcaaaaggttggttattaggggcacaattcgcggcattatttagcgacgacctctactttaaattaggtaaacatctcaatgagatggcctcacaattagccgcattctttactgagcatggttttgattttttagcaccagcagaatctaaccaagtgtttgtcattttacctaatgatattgcagaaaagctaacgcagcagtttgtttttcatcgcatattacttgacgatccacagctaagctgtttgcgcctttgtacttcttgggcaacaacacaacaagatattgatgattttaaagttaaatttcttaaacttatttaatcggtctatctgttagtttaatccttcactcactttatgatattacgcgtgtaataagcgcgtaatatctatctcgatcgcgttttactatcaaaaaaggcaattgattgattgtgagtcgttgaaatgatgttatattaaagactcctttctcaatacagggtgtgattgtatgaaaaagctgactcttcaagagatgacagatgcccaacagatgcgcgttagaaccaggatcggtcaagagagaaagaaattggggcgtgaattaactaacgccgaaatgaataaagtgaaagatgctattattaccgaaatctccctcgaagtagaaaaagccagcaaaaaagccctttcccagaagaaaaaacagaaattagtctctagtgatgaaacctatagctggtctgcccaaaaccatcgtcgcgggtatcgttagcaatagctattatattagccctaatatatcaatatatttattagggctaatagttatattttcttgaaaggtatcagaataatatatttgtagggcaggctatatcttctagtaataagtcaccttcaattaccttattatataatatcgttattttaacttatcataccgtagaaaattccatataatagaataaaagctgaaacttatccatatggatagacaaattcctaaaataatgaatttctctagcgctaagtattaccattcctataaaattaagcactagttggtaaataaaaaaagaaaaggcaatttaatatctccttattcattatttattgattagaattttatatatgactttcgacatttttttatcattagccatattttcatttgttacttcaattacaccaggcccgaataatattatgcttctagcatcaggtattaactttggcttaaagcgtacaatgcctcatgctatcggtgtgtctctcggtttttttgtgatgttattggctgtggggataggcataggagcacttattaaatcatcgcccattatttacaatatattaaaatatctcggagcgctgtatttattgtggttagcttggaaaacggcaattagtcattctgttgagcaaaatagtaataaacaaggctcaccgttaaccttgttagaggctgcattatttcaatggattaatcctaaatcatggatgatggcgatttcagggataacattatatacctcaccacaatatccttatatttcaatgttgttagttgctattattttcacattaattaattttccttgtgttgctatatgggccacttttggtcatagcttacgagagcgattaaaaaatcccaaaatattaaggctatttaattttattatgggtggtttattagcattaagtgctatttctgtattattccaataaatagaaaagggcaagtatcatctcgccctttgtataaccctgatgttaacgcaatattgttttatattttcattgtttcaataagtgtgtagagctttttaaaggcattatatttatcttgatatgccttatgtttttctaaattgggaacatgacgtgtttcaagttttggctgagaaagaataatttgtgataaatgagccggatttatcgctaattgcgccagtctagcagctcccagcgcgggaccaacatcaccaccttgacgataatccaaggtttttcctgtaatatcagctagtaattgtcgccaatattcacttcttgcccctccaccaattaacgttatattgtctgcgtgttgtccagccttatccgccacttcaattccttgcctcaacgcaaaactaacaccttctaacaccgctcgacataaatccgcacgctgatgttggtgagttaacccccaaaatacacctttggcatccgcattattataaggtgtccgttcaccagaaagataaggcaaaaagagtagggaactatcagaatgagcatgctgttctatttctttaaacattgcaccaacatcactgatccccgttaattggcatgcccaatctagacaagaagccgcacttaatattaccgacattaagtgccaagtttgtggcaatgcatggcaaaaactatgtaccgcattgtcactgttttggagaaacttttcactgacaacaaaatagacaccggatgtgcccaaagagagcattccttgacccggttgatatactcctacaccaattgcacccgctgcattatcaccaccacccgctataatcggcacttgtttcatttgccattttttagcaatttctggcagtaagtaacccgttatctggttaccttcaaataaggtcggcatttgacatcgagaaagccccgttgccgctaataattcatcactccaatcgcgtttttgcatatccaaccacagtgtacccgccgcatccgacatatcactggcaaaattaccactcattttccaacgtagaaaatcttttggtaatagcacatgagcaatctgacaaaagatctccgcttcgttttctgcgacccattgcaatttaggcgctgtaaacccaggcataactaaattgcccgtaatttctttaaattgagggtactgctttgccagtcgtaaacactgtttaacactgcgaccatcgttccataaaatagcagggcgtaatatattttgctgcgcatcaagtaataccgcgccatgcatttgaccactgagaccaatggcttggatctgttccataggttgagtacgactcagttgttttatcgcttcatcagttgcctgccaccatgcttgtggatcttgctctgaccattgaggatgagggcgtgagagggttaaaggtatagaatgactggcaacgacatcaccttgctcattcatgatgatcgctttaacacttgatgtgcctaagtctagccctaaatacatgacgttttaccccatgatcttatgttaattaaatcaataaacacagcgctactctgctgtgtttatctttttatacccttaaccaaaaatataacgattcactaaactctctagcatctcttgacgtccgctttgtaagcggggcgctaaggtattgctttgtgcatattttgccacttcttcaagacttaatttgccttgtaggatattttggccaagttcagcactccatcccgcataacgttgagcaataaatttatcaagtccaccgtcttggatcattcttgctgcaatacgtaatgccattgccatggtgtccattccggatatatgcccatagaaaagatcgtatttatcattactttgacgacgtactttggcatcaaagtttaatccaccagtcgtaaaaccaccggatttgagaatttcatacataactaatgcattttcttctacactattggggaattggtctgtgtcccaacctaattgtggatcacctcggttagcatcgactgagcctaaaatacctaatgcaatagctgtggcgatttcatgatggaaactgtgacccgctaaagttgcatggttagcttctatgttcactttaacttctttttctaagccaaattgttttaagaaaccataaactgtcgcagtatcataatcatattgatgcttagttggctcttgtggcttcggctcgatgagcagtgtaccttggaatccaattttatgtttatgctcaacaaccatctgcataaaacgaccaatttgttcccgctcttggcgtaaatctgtatttaataatgtttcgtaaccttcgcggcctccccataacacatagttttcgcctcccagcgtttttgttgctttcatcgcttcacaaacttgagttgccgcccaagcaaatacttctggatcaggatttgttgcagcaccagctccgtaacgaggatgagtaaaacaatttgcagttccccataataatttaacgcccgtttcttgctgtttttgcgctaatacctcagttattgctgccatattggtgatatattcattaatgctatttccttcagagataacatcaacatcatgaaaacagtaaaaaggtacattgagtttatggaaaaattcaaaagcaacatccgctttacgctttgcttgttctagtgcttctcccggtgtctgccaaggtctatcaaacgtaccaataccaaacatatccgaaccattccagcagaagttatgccaatagcaggcagcaaatcgcagatgatcttccattcttttccctaaaataatttcatctggattatagtagcgaaaagcgagagggttatcgctggtggtaccttcatattgaatttgttcaattttatcaaagtaagacatggaaccgtccttatttagtatcaagttgtaattctgaatgtgatccaagctcagcagtcatttcttcctgctcttctggtgttaatttagcaatgccaaaaccggtgaaaccccataacatggcaaagaagatgccactccagcacaatacagcccaaggcaaataacttagggttgcaacacctaatgtacccgccatataagcgccggcagcagtccaaggtaagataggctcaaaaatagtggcggaatcttcaacagtacgagcaaggtttttagggtgtaaaccgcgttcaatatacgcaccacgtaacatttcgataggaataagaatagagatttgtccattgcaagtaacaccaatcatggtcagtccacaggcaatagtcgctaagatcatcgatcccgttgaatgcaccatttttagcagtgcatgaactatcacttctaatgcaccgcttaaagatagagtccccgcaaaggagagtgcgcagaaacagataagtagggtgctcatcatggagttcataccaccacgatttaataaattacctaataattcaggtacttctttaccttggatcatggagacattaaagccatcaacggcactttttacgatatcatgtaagccaaatccttgaataagataagcattcaacatcgcaatagcggcagaggccagcataactggaatagtcggttttttcgtgaccgaaccatataaaatgactaatacaggaataagcaggatcaagttgaagtggtaaatattctccaacccattggtaattaaggtaactttttcaggcactccttgtcctgctaaatcgccattcataccatagacagtcatgataatcgctgtgaggatcaaggaaggtaatgtggtataaagcaggtgacagatatgttgataaagatctattctggccgccattgcagcaaggttagtatcccctgatagcggtgagagtttgtcaccaaaataagcaccagcaacaacagcacccgcagttgctgcaagattagcctccataccgacagcaacgcccataaaagcgacgccaatagtgcccgccgagccccatgaagtaccagtacaaactgatactaatgatgtcactagcagtgctgtaacatatagcatttcaggactgatcatctttaatccatagtagatcatcagtggaatggttcctcccaccatccatgtcccgattaataaaccaacgctaattaagatcagcaaagccggcatcgttttggcgattttttgtgagatagccgttaagatttcgtcgtaacgatagcctaatcgtttaactaataatgccgcgacgacggttgataacaccattagtggttcgggaggtaaatcaaaagtggcgtaacctccgcctaatagcaccaccattgtaaatataggaaacagtgactcgagaagtgtaggggttctcggattatttatcgtttgcgttttcattgtaatttattccaaactggcgtgaggtgaggtacgaataagccgagtaaaaacggtttctaatattgaacgaggtgtagcaatattaatgcggaaaaaaccatccccagccgcaccaaaaccgcttccccaactcatttctacttcggctaatgaaacaaaccaatgctttaattgttgttcggttaactgcattttttgataattgatccatagcatgtaggtgccatggctttgagtaataacccaatcaggaaaataacgtgcacattgctcttttacccactgcctgttttcagcaaggtaatgtttaagctccttgatccattgttgaccttgtaaggtataagcttgtaagaaagcagggacagagaagtaaccaggattatgaatacctgcggcaattaagcattgtttaaatttctcacgatattctggattagcaatcacaatattggctatttcaagccccgctaaattgaaggttttagccggtgatgtgcaaataaaagagtgttgctctacatagctacttaaagttgatataggtcgataaatggcattatcaaaaacaaaatcagcatgaacatcatcagaaataataaaaactttatatttttcagcaagtttagcaatttttaataaatcagcttgttgccatactgttccggttggattatggggagaaagcaatataaaacagacagattgtttaaatttatcttctaaatcgtcaaaatctatttcatagcacccattatgataaattaatgggctttctagtagctggcgatgatttacacaaactgtattgctaataggatgataagcaggtgacaaggttgtcactttatcgccaatttgagtaaaattttgaatatagagagagacggcttggataatacgagggcaaaacaccacagattcaggtgtaacatgccaagcatattgagatttaaaccaatttaccgcaacattattccaatcagagctaagatcggtatagccataaataccggttaaattaaactgactgagtttgttaataataaaatctggtgcagaaatatccatatcggcaaccgataatggaataacattggcgttactgttgcaccatttagcactgtaggtattttgcctagaaattaatttattaaagttattctgattcatgaaaatcccctcggcaatgtggtttaacaacaaaatactcgttgtacttactcttggttattcctattttttactttgctattacgaaatctgacttgtgtgatagtaatcacatagccacgaaggagaatgctggcaaatacaaagctgtggtttaatggccaacatggaagagtgggtgatctaatatgaaaaaagataaatattttcgtatcgtgctgttattcaacgctaataaagtctatgaccgacaagttgttgaaggggtaggtgaatacttgcaggcgtcacagtgccattgggatgtatttattgaagaagatttccgcactcgccttgataatattaatcattgggtttgtgacggcattattgcagactttgacgatcccattattactcaacatttaagccaatcacccttatctgttattggtgtcggtggctcttatcatcaagcaaaagattatccttctgtgccgtatattgctactgataattaccaattgattcatcaagcttttttacatttaaagcaaaaagggcttaaacattttgctttttatggattaccggcaaaaaactacccgcattggtctaatgagagagaatatgcattccggcaattagttactcgcgaaaaataccctggcatcatttataacggtatggatatcacacaagagaattggcaacatgcacagaatcgtttatctgactggatacaaacgttgccaccacaaactggtattattgccgtcaccgatgccagagcgcgtcatttactgcaagtctgtgataacttaaatattaatgtgcctgaagaaatcagtattataggcattgatgatgaagatatgacacgttatttatcacgtatagcgttatcttctgtagtacaaggttcacgacaaatgggatatttagccgcgaagcttctgcatcaaatattagaagggcatccaaccgaacaactaccaagaatattagttcctccagtaaaaatcattgaacgtcgctcaacagactttcattcatttagtgatcctaccgttgtacaagcaatgcactatatttattacaatgcttgtaaaggaataaaaactgagcaagtgttagacgctgtaaatatgtcgcgttctaatttagaacagcgttttaagaaagaagtagggaagactatccatgccgtgatttatgaagagaagctgaaaagggcgaaaaacttattagccacaacaacattatcaatacaagagatttctttgatgtgtggctatccgtcgttacaatatttttactctatttttaaaaaagagtttggcatgacaccaaaggattttagagatgagaattaataaaaataacaattattttttatagcgactatttgcccaaggatcactttcagaataattgattgtatcatcaaggttttcttcaacaagatttagatatagtgcttctacctcagagcgcgcccaaggggttctgcgcaaaaatttcaaactcgactttacacttggctcgtttctaaaacagttaattttgattcgttggcttaatttaacccaaccatatttagccactaacgcattaacttgcatttcaagcgtgataccgtgtagtggatctttagaacgagcttctgtcatggtttactcaaataggttgataataaagcgtagcagagtacaagaaagtaacacaagagacaaccaaagtataaagccatctatattgttattatggttaaaaatcataaattacaatccatattatagggagagaaatccggatttttattttttatccaatcgataataagtggtaacgaaccttcagtgtaagctttacggccagcccacagaaattgtaattgacggtatattggccaatcactttctaattgataattaaattctggcacacggagtaatccatgactagcatgagggaaaacaacaatatcagcttgatgatgagtatttaatattgcacgatagcgacaagcattaagctgagcattaacgtttaagtcattatttccccataccgctaatatacgaccattcatttttcttaaataacttgatgaatcacttaagtaatttttaacaacaaaattaaatcgatcttcactcatatcattgcgacgagtgcgatcttttgtaccatgtagtccaaaaatatcatcattttctttttgttcttttgccagcaattgtataatttcatccggtgtttttccttgctgttcataacgcaatttttgataatattgtccttgttctcgccaattgacagcaccaccaataatcacagaaaaagctggttgtgattgactagcggcgataggaataacccatccggcttgagaaaaccctaaaaaacctacttgaacttcgggataacgaagttgcattaattttaatgcagctaccgtttcttcagcgcgagcttccattgattgatgtagccagtttccttgactatcaccaatgcctgctttatcccacgagaatatcgcgatatttgcatccaaaaatgtattgaacagagggttgtagccaccatttgaataacgatcttgaggcccatcaccatgaataacaacgataaccgctgacggagtcttatgttgaggagtaagaagagttcctgatagacggtttccttgagataaaaaacttaattcttcttgatctttgttttcatagtcaaagtcttgaatatggcttgtaaaaaataatagggtggtgataacaagcagtaatagaataaatatagcaattatatatttacctacagcataatgaactttcattatttttctcttacgttatgtttttgcacataaaaatctgataatactacattttttgttataaatataacaagtaacaagtgcttttaaagatatcattgcttaataaagatactaacttcatttctactctacattcagtacagagtaacatttcaataggtatcgaaacgtttattattttctttgttatcctgcttattcttaacaaggagaataaaatgatcgctgttatctttgaagttcaaatagccacaagtaagcaggggcaatatttatctttagcatctcaactaagaccattactaaacaacattgatggatttatatctatcgagcgctttcaaagcctagcgacggaaggaaagctattatcgctttcttggtggaaaaatgaagatgctatactgcaatggaaaaataatattttgcacagcaaagcacagcaggaaggtaaaaagagcatttttgatttttataaaataagtatagttaaactagaacgttgttatgagtttacaagtactcacacgtaattgcaccgtactggacaatagagccgttataagatgaataattacaaaacaaaaacggaatatgagcatactttggagtcagcaatagccgcggttggagccgctattgcggatatttccagagtaaaaatactctgtgctttgatggatggaagggcatggacagccaccgagttgagcattgttgcggatatctccgcatctaccacaagtagccatttatcaaaattactcagtagcggccttatttctgtgatctctcgtggtaaatatcgctattttcgattagctagtgatgatatagcaaaagttattgaaaatttgatgagcttctcaacagttcatgtatcacaagcaaaaattaccaccccagaacatttaagaaaagcacgtacatgctataaccatttagccggtgaaattgccgttaaaatttatcaggtactttgccaagaagaatggataacaaaagatggaacagaaataactgaattcggagataaacgctttaaattgatgggacttaatttccaagcaaaacattcgcgcaatatttgttgtccttgtttagattggagtgaaagacgttttcatctaggtggacaaattggcagtgcattacttaatcatgcacagacacaaggttggataaaacgccaccaaggatatagagaagtgacgattaatgaaaagggcaataaagcttttgcccaatattttaatataacaatatgatctagatgtagggggatatcgtgcacagattagttattaataaaacctgtatagatatcgatagagtaatcgaataaaaatctcacacaaacatgcaattagtgggattaagaatgaaccgtatatgatatagatagtcactgttatgtagccaaattcaccaagtaatgtcccacttcctaagttagaatttttgggtaaatcgaagtagatatgtgtataccatgcaaatagagataaaaaataaggaaaaataaaataaaacaaacatttatatagtgaattcatttttccatttaaaaaaacaaacacaggtgttataacaatcagatagacaaggtagtagtgacttataatattaatatgaccgaataatgctatggcattcgtcgcatgcgaaaatatattaaaaaaaagctgatgagccatttcagcataataaaaaagcacactgataaatattgatatatatggtattagggagttcttattaatacgcacctgaaatgattcctcctcgctctggaaaatagatatcaagcagttgtttttttaactcccaaggagaacgtatataaattggagtatcaagattactaaatacaccaccagataactttaaaacatgagtgattctagtagcacaaaataaagcattagcaccaccaagttcataaataagtttggtaatgtgttcagcttgttctctcggaattacaaactctataataacgatatcatcaccatcccataactggtaagaaaggtaatcatcccaattgaaatcaggatattgaaagaaatcacctgacccccttaatgtgtaagaaccatcttcacattgattatttttacatccggtatagcttccagcaggatcatataacaatgcatctataaggctaaataaaaaactattacgattttgaatggtgtaatattcttgtgacttagttctactatatatttttatctctacatagtaaatgtcatatcgagtatcccataaaaattctcagattggttagaagtggagttattaaattcttaacacatatctgagtcaatagggctttgaagcgctaaatcattaaaagaaagcatccataaagttattggttattacatgccatttaacataatatacattatgcgaaccacgataggtaaatacggatagtcgctgaaatctctgtttttggctgattgattatgttggttggacccaatgttttttgtctttttatcagatactactttagaaaggattttaataaagcctttttagatgtttctaccgtcagttaagttagaaggttcttgattcacataatccactatatgtataaagacgaaccttctcgattgcggtaaaccccaaccccattctaccgcaatcgctcagaacccttttgtaacatagcgtcacacattatgcgaaccatgataggtaaatacggataggcgctgaaatctctgtttttggctgattgattattcaattggacttggtcactactttagtatttccaaccgactttctttaatttatatgctgatgctacattgctagccgaggtttgttataggaaatgatgacatgttcataatatataacacatctcatatataagagtgatttttgtatatttccttgttcgtcttatttctatatttaatacatcagaatagataaaattaaagctccattatagttaaagtaaattattcctatagagatagtcgcataaagataatcatattggaatataaatatttttatgaatattccttttttatatgctaggctaatttaataaaaaccttgtctcttaataagaaataatttttagtaaattcctaggaacatttatgaaaatgaaatactcaccattttttatattactcatgacaataggtacaacattaagctatgctactgatggtgaaattaaaataatggcagggaaaactggctatgtaggcgaagttgttccagtgacaaaattagctgaaacctttcctaaaagtttcactgccccttcgagcgctaattattatgctaggcttggttttctgagccttaccaaccagacgggttattgtggtagtaccgatgggctacaaaaaatacctgaaattaatgaatggggatttaaactaataaataaaaactatcctacctctggctatttactattggcgataaatggaaacattggaggacaatataaaactaataattcaggtatccaaaatataaaaggagtattaactcgatctaagttgactcgttcaagtttatataatgtaagcaaaaatggttctttttgttggggaccttcggcttatgatcaagaaaatttttatgatccttcttttcgatcttttgtctctatcagtataaatagttattcagtttatgcatatggcgatataaaacctggtattttttcattagaaactagttttaagttgtcaagaaatacagctaatagcgttgatgatagtactgcttattttatccgccctggagaaattaaagttacggccttaagaagctgtaacgtgacaagtagtactgagactaatattaaatttaaagatcaatttacatcaacatttacttcaccaacattattagatacttcaccagtaaattccgttaatgttacatgtactcaaggtggaaaaaactatattacaataaaagcttataatagtcttgttagtggaaatatgtctggaatgcttttaaatggaacaaaatcaaacaatcaatcagaagtttatgttgttgcatcattaaaaaatttaacaaatcaaacatgtcaagcgaatgatacaagtgccattagattctttgatggtcactatatacccaatatggataatataaaatcctttaatcaaacttttctatttggcctatgtgctaatggcaaagttatagcagataaatattcaggagctgtcgatgtttcatttatcgttgagtaattattctgatagagcagaaatcagatattaaaaccaattttaactaagttttttattaatatttctctaaaggtataaatagtaattttacacctatttatactatttacaccatttgtcacaccacttgtgaattatacaacttccccatttaattctaatatatttacattccaattttgactacctaattcacacaccataccaccgtcatatataaattctttcttctcattattctcaataaaacgggtgagatttttcatcggaatatatccagaggagagataataagcatgagaaacagcaaataaaatagaaaaattaacagaatgctctttcagtatagcatgagccatttttattaatgatgccgcaacgccctttcctcggtatttgtgagccaccactacacaactcaatataccaatggtttcaggaaatgaatctaggtaaacatctcgtaaataaacagctacatgtccgataacctgattatcatcaattgccagtaccaacttgtaaggtatatcaacctgataaaaattacccttcatatcctcaaaagctgaattttgtaaggctattgcttgctccagaatttgttcactaacatctgaccaactataacattcaattctcatttgatttctcgctcttataaaaccctttatttattaatggaataatgttaaataatattaattatttattctattggtgacctattgtttttcatttatactccccaccattataaacatatttttataaaacacctgtacaaatagaggaccaatggaatatttaaatacaaaaattattatcggtagttcaatcatcgctttagcaacactgtattttgctatttatttaatactatatcttattaaatgcgttaggactcaaacgccttttactttaagaaaaatatggaaacaatggttattgagtagtgttattggtctaattggtgcttatattgtacaacttggtgataatcaaagaagaagcgaatttaccaaagaagaggttagctttatgaatgaaaataaagcatatagccaatttacctcggcagacaaagatctcgcgtcaaaaataacccataaatgtacttacaattcagatgctgtatttgaacaatgtttaccaaaaatactgacttgggaagcaaaaatttatcaatcatataatgcacatcgtaaaatttctgatagtgaagcgataaaatatacagaagaagaattacgcgataagcataattactggatcaacaaaaaacgctaactccccgtctgatccgttagatttaataggcttagagtctgtaagttattttaagcctattcttaatatctctcattttgtaatacaatgctcattgtattaactaacttaatcagatagttagttattattacttttttaatgctttttaatacgcattttaggagtattgcaccctattcttcccgaatattctgatgccagtacgattatgatagcagtaactttataatgttctttatactggagcttataaaaatgaatatcacgtttaagaaaattggaacaatgtgtgtcgcttctgttctgcttttttcacttgcgggttgttcaagcatgacaaaacgcgatcgtaatacagcaattggtgccggtgctggtgctataggtggtgcaattttaacagatggtagtccattaggaaccattggcggcggtgtattaggtggtgttattggccatcaagttggcaaaaaataactattaccgttatttactatgctaaactgagcttataaatttttataagctcagattcgagcaatgacctatatagtaatcatagttacgagtaaatgatggtaagaacggctctattgaaaattaaaaatttgattatttggctttatcatcagtttagcgatctgctccatatcgcggtgacttttgtactctgttatttttgctttcttttatctcccacacttaccattgccgttataggcgtcgtgattattgttgtaaccatgtttttattaagcctatttgttttgccctagcttttttatgacacctctgtattaaaccttctctactgtgacacgaaataaaaaccccctttcaacccactttgatcagtagtgaaaaacgtataactcagtgatgattaaagttaaaaatcttttacattggcaaagaaccttatctttcccctgatttatctcaaagctgcatttttcaacttgactcttgttaacgttcgctttttactttcaaagattaaaacaatgaggataagtaaatgattatatttatcaccggtgcttctgcaggttttggagaagctattgctcgtcactttattaaccatggacacaaagttattggtactgcgagacgtcttgataaactgcaagctcttcatcaagaactgggcgatctattctatcctttacaattagatgtcaccgataaaaaagcagtcagtgaaatttatcaccaattaccagaacaatggcgctcaattgatgtattagtcaataatgcaggactcgctttaggattaagtaccgctgataaggccaatcttgatgattgggatactatgatcgaaactaataataaaggtttagtgcatgtcactcgtgcattactaccctcaatggttgaacgcaatgtcgggcatattattaatatcagctcaacagcggcttcttggccttatatggggggaaatgtgtatggtgcaaccaaagcctttgttaagcaatttagcctaggcttacgtgccgatcttcaaggtaaaaaaatacgtgttactgatattgaacccggtcttgtggggggaactgagttctcattagtacgctttaaaggtgataccgataaagtagaacaaacttatgcaggagcagatgcgcttactcctgaagatgttgcacaggcggttttttggacggcaacattgcctgcacatgttaatattaatacgcttgagatgatgcccgtcagtcaatcttttgccggattaagtgtgcaccgacaaaattaaacgcactgaaaactcattttttgttaagggatcatatatacttgttgatataaaatagtcattgttcagtgctacataattttagaggatagccattatgataaatacgttaactaagaaacaagcaacaaggactctgctattttcactatttcttggtttatccgtgtcttctttttcttctgttgcagcttcaacaaatgtaaccattaatggcaatggctatgataatgttttagataaagagcaagctcgacaaatgaaagaagattgggatcaaaaacgcgatctccgtaataaaatcaaccaacgcgaaaaaactgagtttaataaaatagataaagctattgatgagcgtgatgcttgtttaaaaagcgccaatatctatgcttactgggagccagaaacacgtcgctgtttagacagtaatactggtcgcccaattaacccttaatataaataaaacaatgatgttttaaaaatcaagcaaggagagaaatgttatgaaaaaatatctatttgcattactggctacattgttcgcatttgcacctttagccgcaaatgctggatgtgatgaagtcgttcaagatattcaacaaaaaattgaaaataatggtgttcctgcggctaactttaccctaacagtggttgaaaatgatcaagttgcacagactgaaggtaaagttgtaggtacttgtgaaaatgattctaaaaaaatcatttatactcgccattaatcattgatttaatagaattaatagctaaaaagggtactttgtgtgcccttttcttttttaacctaaatagcgattaggctattaatatttagtattcattgttaaataaaaaaacacccaatgagttaacccattaggcgttgataagtaataagtaaaactaaatattaataggaaataagttattgaatagaaataacttatttttattctctttaattgaccttaactaagcgggttgagcgatttctaactggcttaagtcaagataacaagagagatcacgttcttcagggcgcaataaatacgggatttcaccaatcaatggggctggaatatgttgagataacctttctacaatttttgcatagtgcggtaacccaggattaattctattagccacccaaccaactaattctaaaccatcattaataatagattgcgcggttagaattgagtgattgacacaaccaggttggatcccaaccactagaacaacaggaattttttctttagcaacccagtctgaataaaaagtattatcatcaagtaaatagcgccaaccaccatttccctcgataacaacgcattcagctttttggcccaaattatttagttcacttgaaatttgatggaagtctattgcattttcacttacataacaattttctagcaaaatagggttaatttcgtcgtagcgagcgtcaataggtgaggaattatgaataatctgagcatcacgattacgattaccctcaaccgtttcatgtaattcggttgcgataggcttaaagcccactgctgttgtcccgccacgatttattgactgaagaagtgctcgggtgacaacagttttacctatgttggtatctgtccccgtaacaaacaagcgtgttaacatataatttacttccgttatgacagataaatcaggtttacgaaaaatgacagagattagagtttagggtaacactgtttatggtggcttgagttagctcaattttttagttaattgagtaaaaatagggtaatgtaagtgatcaattggcctacttctctatgcataatactttaattatactttattgtattattattagccttgcattaactcaagtaataatgagccattatataaggcttcttttactagtgatgccgctggcaatgtgcctttattgcgcaattctgtttcttcaataaccaagttatgggcatatctaggtaatacatggtgttggatactactaaggatcagggggaaaagtgcagattttgctctacacagaggtgaacctattaatattttttgaggattaaaaatattgaccatcacggctaaaataaaaccaagtcgttgcgccactaaattaatgatgtctaatgcttgtttatcaccaattaatacagcatcacatagcgtttctaccgtaatcggatattgattaagtattgaggtgggattttcttgcgccaagtgctgtgcttttttaattaactgagggatcgatatttccgtttctaaacacccttttgcaccacaataacattgcgtctgtgaatcaataacttttgtatgccctatttcgacggcactatggctgtttgaatgtaatgtctttccattagtcacaacccctgcaccgacaatatcatcaataacaatttgcagaatatcggtgttatttttggctgcaccatagagtgattcagccatcgtccaagccgttacactgtgttgtaagaaaacagcaacacctgttttttcctgaattttatcagccagcggaatatcttggatagcatagtaaggagagctataaataacgccactaatcggatcaacaattgcattcatggtaatactaattgcagtaaggcgctctactcttgattgataacgttgaaagaatgtatctattgcagcaaggaaatgatgcaaaaaagcatcactattttgtttaggaaagtcgaaggtatcttcaacaactaattgattatctagctctcttaaactaaaaagtaggctaccattatttactcgaatacataaaaattgccaccctttgctctctaactttaaaccaacagccggccgtcctcgaaatcctaacccaggaaattctgtttcatgaataaggtgtgcttcgactaattctcgcgtaattttagtaatactggcaggcgcaagtgttgcttttttagataatgagatacgagaaataggaccatgttcatcaattaatcgaaaaacagtgccaagattaaattgttttacatgatcaatatggctaggcgggatccccatttcatcttatccttaataaaaaagccgtaattaattcgaagctctaaataattatttttcgattatgtcgtcagtttgtgataattgtacaataattacataaaaatcgtgatggaaagcacatataaatcaagatttttgatcttctaagatattttttagcaataattgagtcaacctgttggccgcagcggggatcgttcgtttgttatgagaaactaaccatacttcagagaaagcattcgaattagcaaaatgcagataatgcacaccatcaactttcatgcgggtaaatgattttgtcacaatagaaatccctaatccggcagcaacaagccccaagatggtcatcgcctctccggcttcctgtgctatcgttggtgtaattcccgcaaggctaagcaattgaataatttcatcataaagcgccgttcctacatctcgctcaaaaaatacaaaaggatattgcccaatatcttgaatatttacgcctgtttctttgtatgcaagtaaaggatgcccttcataaactgccaaaataaaaggttcacgaaataggagctggtggtgcaaattatcaggtaacaccgtattacgcataattcccaaatcgatgtggccagttaataatggtgatatctgctgtttggtattcatttgatgcatatgaataccgacttcaggataattttccctaaattgacgcaaacttaacgtaaccaaatgcataaaaggtgttgttgaggtaaaaccaattgaaatttcacctaattctcctttttccattcttgatgctcgtgtcgctaccgccttaacttgtgccataatttgataggatccttttaaaaacatttgtcctgccggggttaacgaaacagaacgattggttctttcgagtaaacgagcccctatctcactttctaaggcttgtatttgctgacttaaaggaggttgggaaatatttaatctctcagctgccttaccaaaatgtaattcttcagcaacagcaataaaataacgtaaatggcgaagttctatattcataatttgtattattcgttgatgtaaatgcctattgatactttaaaagtcttattgctaataattaatatattagacaaaaaaatcaaatgtttctaacattgatataaatcaaatttaagtattggatagccactttttatggacactcatgaaataagcagtaaaaacatggccctaaaagaagatgtttctatcaacaccacttctaaaccaaacagtccgaaacactatatccagcgtgatgacgcgctttatataaaagtgacagtgtcattttttatggttggtttagccacttttgcattactctactttgtgcaacctatcttacctatcctatcaaaagaattttcagtcaccccagcaaccagtagtcttgctttatcgctttctacaggtcttatggcttgtggtctattgattacagggcctctttctgatgcgtttggtcgaaaaaatgtgatggttattgcgttattttgtgcggcttttttcacactattaagtgccatgatgaatagctggacggggattttaattacacgagcactcgtaggactatcacttagtggtgttgcagccgttgcgatgacctaccttagcgaagagatccatcctgcttatctagccttatcgatggggctttatattagcggtaactctattggtggtatgagtggccgtgttattactggtgttttgagtgattattactcttggcgtgtgtctgtgattattttaggtatttttgcccttgttgctgctatcattttttggcgaatattgccgacatcacaacattttaggccagcaaccttaaaaccacgtaatcttcttatcacaactaaattgcattttagagataaaggactccctcttctttttattgaaggtggcttgttaatgggagggtttgtaactttatttaattatattggttatcgcctattagatgcaccttattcattaactcaaacaaccgttggtttaatttcaattgtttatttgagtggaacttatagtgcatcgaaagcaggcttattaaccaataaatatggattaggtaaagtgtttattgccggtgtttctatgatgctagcgggtatattaattacactatttgactctctagcaattatttttataggtatgcttattctaactacaggtttttttgctgcccatgcggtagcaagtagttgggttggacgtcgagctaaacgaggacgtgcgcaggcctcttccctttatctatttacctattatgcaggctcgagtattgcgggaacactaggtgggatcttctgggtcaattttggttggcttggtgttggtttgtttattgcttttttaatgttaaccgcactattaatcgcactgcgccttaatcaaatagcacaataaaaagtcataattttctatctgttaatttataaaaacctattgataataaagaaaattgtgactttactttgctttttttagtatggagtctctattttgaaaaggacaacaaccatgactttaataaaattaccaataatactagcaacactattatttacatctatatctgttgccacagtagacaactgtccaccgactaagccagattgtgtagacgaatatacagcttttcattaccctcctgaagaagattaaaaataaaaccaagctagcttaaaaaaaccgcatataacgatatttaagaaaaatatcatcaacaaagtgcccttttatcgctatactgtataaataaacagtatagcgtaattttttaattttcaccctactagacgatatacattccactgaagtttatgtattgtttttaataacggctaattgtatgttgtaactaaataaggttatagagatgagcaaatatgatgcaatacagcgatttaatctctgttttcaacaacttgaaacagaaatcaatgctcttaccgattttcttcgtcagttaaagcaacttccttctgcggtttttgaattacctgaggtaagtaaagaagatgaacatgatgagataacaaatgttacagtgtcacctagttatgatcttgatgctttagaactctctttaaaattaatgaccaatctctttatctatgataatgccccacatgtcagtagcaagcgtgcgatacgtttaccgggggtactctgttttagtgtcagcaatcctgtatttaagaatgtaaaaacacaagtagagagcattaattcattaaaaaaacagctttcagatattgtgacgaaagagtctggtatttcgaaagaagaacgttttgattttgtccataatcagctaaaaggcttaattacacttaatgcttatcgcaccctcaccctactttctgatcctgatacagtacgttttggctgggccaataaaaacattataaaaaacttaactcgtaatgatgtgttagctcagctagaaaaaagtcgagaagccaatcgcgccgtacctccttatactagtgaacaatgggctgaacgtatcgataaagagataatgaccctttcacaactcccggaaaatgccaaattaaaaattaagcgtccagtgaaagtccaacctattgccagagtttggtattcggagcaacaaaaacaggtacaatatgcttgtcccctaccattattagctttctatattgataaagcgtcggattttaagcccataataggtgaattagctgattatgatgtgaataatattcaaattcgccatcgccctaaagccaaaaagttacaattacttattccacgcttacatttatatcttgaaaaataagcaatagaaaaaaaatcccgctatctgggatagcgggatccaatattgtactagataaaataagcgtataattgcttattttttcatactaccaaccatatcttctggacgtacccagctatcaaattcttctgctgtcaggtagttcagtttcagtgcagattctttcagcgttaagccctctttatgagctttcttcgcgatctctgcagctttgtcataaccgatatgggtatttaatgccgtaaccagcattaaagactcatgtaataatttattaatacgctcacggtttggttcaataccaatagcacaatgctcgttaaagctacgcataccatcagccaataaacgcactgattgtaggaagttatcaataatcattgggcgatatacgttcagttcaaagttacctgaagcaccaccgatattgatagcaacatcattacccataacttgagcgcacagcatggtcaacgcttcacactgagttgggttcactttacctggcataatggagctacctggctcattttctggaatagaaatttcgccaataccgcaacgagggccagatgctaaccaacgtacatcattagctattttcattaatgaggcagctaaaccttttaacgcaccatgagaatgaaccagtgcatcacaggttgctaatgcttcaaatttgttaggagccgtgacaaatggctgacctgataattcagcgatacgtttagcaacgcgaactgcgtactcaggatgtgtatttaatcctgtaccaaccgccgttcctcccaacgcaagctcacacacatgaggaactgaatcttcgatatgtttgatattatgctcaagcatcgccgcccaaccggagatttcttgacctaatgtaagtggtgtcgcatcttgcaggtgagtacgaccaatcttgacgatatcatggaaagcttctgctttctctttaaatactttcagtaatgattttaattccggcagtaaatcctgacgtaatgcgataacagcagcgacatgcatggccgttgggaacacatcatttgaactttgacttttgttaacatcatcattcggatgaattttgcgttccatgccacggataccacctagtatctcactaccacggttagctaacacttcattcatattcatatttgattgagtgccagaaccggtctgccagattgctaatgggaattcagttgggtgtttacctgccagcacttcatcagcagcagcaataattgcatctgcacgttctttaggtaataacccgagatccatattgacaccggcggcggcttttttggttaaagcaagcgcgtggatcagtgcaacaggcattttttctactgaaatacggaagtgttctagagaacgctgcgtttgagctccccataactggtcagctggtacttcgatttgtcccattgagtctttttcaatgcgagtggctgccatttcaatctccttaagtacacagaataattgattagttccgaattactttctagtaaataactcggatacagctatcatgccataaatagaataataaatatgagagctaaagcgagcttatgaaatttataacagaatgaaattggttgatttttctgattaaatgaggttggctcacgataatattggtgtttttgctctctatttataaccatattaattacaagcttttattctgtatcataaatacaaatatggcttaaataaatatacttttaatccaaaaaagaccaaaaaacgacatttttatctttaattgccttatttaagttatctataattatttctctttaaactcattgtgttagcttataactaagtaagttctgattgcgttcttatttcactaaatctatatttacagagaatatagatagcaattaatatacgctaattatctatattcatattcagagtattgataaccaaaaccaatttgttggattgtttaagggtagcaaaacaatcttaagaacgtatgctacgaagcatacacagaggatggactagaattatgaagaaatcgcttgtcgctgttggtgttattgttgcactaggtgttgtttggaccggtgcatcatggtacatgggcagtaaaattgaaagccgcttacaggaagaaaccaaacgcactaacgttcaattagcgcaacttgctaaagaaagccaattaggtgcggatattaaacttgaaattcgtgactataagaaaggcgtctttacttctactgctgatcttgcggttgtgatttcagagcatgccaaatcagatgaagataaaaaagtagaagaagtgctctttaagacggatattgaccatgggccattccctctttctgatattgctcaatttaatctagctcctaagttagcagcaatgaataatactttagtgaataatgagaccactaaagatctatttaagttgaccaaagagccatcatttattgatatgcactcttctttatcgtttgatggcagtgtatcaggtaaagttaacataaatcctattaattacagcaaagatggtagccagttaacaacatctgcgtttcagattgatttttcttccgataaaaatgcaacaaacatctcaacagcagtaaaaggtgatgaagtcattgttaagaaaggtaatgatgaaacctttacgctgaaaaatattgcaggctctgtcgaaggaactaaagttaaagacgatcaatatctatttgatacacaaacactgaactttggcgatattacctttacgagccaagataagtcatctaatttcactttaaaagatacttctcttgctactaagagccaaattaaagataaattattctttatcactcaagattatagttttaaatctcttaatgttggtggttttgattttggtgcgggtaaatttgcttactcaattgataaagcagacccagatgcgatgttgctattaacaaaagtttataacagcaccttcttaccttggaatcaaaataaatacgataattcagcgatgattgagcaagctgtacgtgatgttttggaaaaaggtttagtattccgtatcgatgaagcatcgcttaccaatagcagtggcgcaagcaaactaaactttaagttagatttaaatgcgttcaatgctgatgcactgaaaaaagaagacaaggcgccttcagttctgtttaatgaattgtttaataatatcaattttaatatcgatctttctgtaccaatgctaacggagttccgtagtaccacacaataccttgatgttatgcgttattctgaaaaaggcttaacagacgaagataaagctgaaattcagaaaacaaccgctaacgacatggcacagttaaaaactgaattacagcaaaatatcaatcaaatttctcaagacgagaaagatgctctgccattgatgctgttatcacaagacggtaataaactgtctttaaacctgaactatgctgctgataaatttactatgaacggtaaaacttacagctttgatgagtttatggaagtaacacaagcccctcaaatgttaggtttagcggctatgttatttggtgcaggtgcttcttcttatgattatgatgactctgattatcctgaatattcagaagagccagatcaaaatgatgcaatagaagagccacaagttgaaatcccagcggcacctgctgaaaacaattaattttagtcactgatagcatacagtcactaatcaataaagccccctatcaccattcttatgataaggggctttttattgttattaacaatcacaatgaggcttaaacacttcgcgtgtgccccaatcttctttacaacatgaatcaatcgctttatgcattatttctgcaagggtattaactgttgatataatagtagagagctcttcacaaacatgacgacacgttgaattatctttattcagatcaggaagtttaggtaatgttaaactgtcacatagaatttcttgcagaactaaagaaaaattagcgatacctgttgtgtatatataagagcgtcctcccgtcatctgcgctaagcgcacatactctttcgtgatgttatctctatcagcaatagtaggaaagcgatccacattagagggatcatcattaggcgttccctgataagtatatacttttactttttcgcttctagcaaccactattgcctcattgtttttaagcacagcggcttgtgttaatacacctccgccaccttccataccttcatcacctaagacaaaaattgcacgacgagcgccatctcgccaatcgaaatatttacacacatcaatgacggctcggcataaatcttctttatttccagcatgatctcgtccatcagcctctttaaatggcgctcttgcttgtaatttgtgagcagatacaccttgtgtcattaaatagtcagtcactgagcgatcgaacttagtattatcccacgtaccttctattcctaaaaaagtgactcttaaacttgatgggcaacgtcctaatgccttttgaacagcatcatctatttgttgacttaaatcagaagattcatcagccattgagccacttgtatctattaccacaactaaatctaaagcaacattgccatctcctgtctccatttgtgaacttaaagtagggttagcagatggtggcggaattattggtttagctatttgtttattactatcattatttattaaactattatttgattttccattcatattctcgctccaatatatgcaatattaaaaataaagtgattagcctttttctagcaagaatatattatgattttattttgtttgttcacttccttattaaatataatagatttgttgttttttaatatcccaatattattaacaataattaataaaacaatcactttatttataattagataatcagcccttccgctaatagacattcttaattcttactaacacctatcagtatatctgatagcttatatcaaaaactatgatatgtttgtttttaaaggaaaaattacattttcagccaagttgataagaagcatcaactatactgaaaaataaagataataaatgtacagtattaatttaaaaataatttttatcatcgaaaaatacaaaaaaaacgcctctttatgtattaaaaataaacaacttcagtttaatttatagtgaatcaattgaaaatcattcataataataggcaatttattactttattccccttaaaagaaagtcaccataacaagtggattttcattattattattaaaaaggaaaataacacgtgattgacacacagttgcctttaaccgatttgcaccgccatttagatggaaacatccgtccggaaacaattttagatttagcacaacaacataatattgccctacctgcctatgagctagaaacattgcgcccacatgtgcagataactaaaaatgagcctagcttagtgagcttcttacaaaagctagattggggcgttgctgtactcgccgatttagacgcttgtcgccgtgttgcttatgagaacgtcgtcgatgttgctaatgcaggtattgattacgcagaattacgcttttcaccttactatatggccatgaagcatcaattaccgattgaaggtgttgttgaagcaattattgatggtgtacaaagtgccttacacacttatgatgttgagatccgtttaatcggcatcttaagccgtacttttggtgaaaatgcctgccagcaagaattaaatggtctattaaaacatcaagataaaatcaccgcacttgatttagctggcgatgaattaggtttccctgggcatttattccaacctcactttaaccgtgctcgtgatactggctggaagatcaccgttcatgcaggtgaagcggctggtgctgaaagtatttggcacgcgattaaagaattaggggcaagtcgtattggtcacggtgttaaagccattgaagatccccgtttgatggattatctcgcagagcaccaaattggtattgaatcttgcttaacctcaaatattcaaaccagtactattgcctctttagcacaacatcctcttaagaagttcttagagcacggtattatcgcctcgctcaatactgacgatccggccgtggaaggtattgagttaaaacatgagtatactgttgctgctcctgcggcgggtttaactgcagcacaaattcgccaagcacaaattaatggtcttactatggcttttattagccaagctgaacgtgatgcattaattaaaaaagtgagtttaggttaatattaacgaaaaataccgccttattgctaaggcggtatttttatcttttgctctatttttacagtgactgctgatggtgttttttagcttgattggcataacgctgagctaatatggcacaaaccattaattgaatttgatgaaatagcatcagcggtaatagcatgatccccaccgttgctgcgggaaatagtacatttgccatgggaaccccattcgccaagctctttttcgagccacaaaatacaatcgtgatttcatcagctttattaaagccaagccatcttgcactataaatattaataacaagtacaatagccagtaatacacaactgacaatggtgatagtcaataacgaccaaccgtcaattttatgccaaataccttcaacgacggcttcactaaatgcaacataaaccaccagcaaaatagaagagcgatcggttctattcactaacatcttatgattatcaacccaacggccaattaatggacgagataaatgaccgataataaaaggcaccatcagttgtaataaaatagattgtatcgcccccgcagtatcaaaatgctcagcagagccttgtgtttccattaaaaaacccaccagcacaggggataaaaatacccctaaaatgcttgatgctgatgcactacagattgccgcggctacattaccaccggcaacagaagtaaaggcaatagcggattgtactgtcgcaggtaaagcacaaagatataaaaatcccatataaacggtaggtgacatccagtcaggtaccataaactgtagtcccaaccctagtaatgggaataaaacaaaagtactggcaaaaaccactaaatgtaagcgccaatgaccaagtcctgacaatatcgcttctctagaaagctttgccccatgcaaaaaaaacaataaggcgatcgcagccgtagtgagatgttgaaagatgacttttatctcaccttgcgcaggtaataatgttgcgagtatgaccaccaagatcataatcattaaaaaagagtcaatttttagcttttgccaccaagacatggttttcgtcactccctaatgtttacagcttaattgtggtttttgattgatttgaaaggctaccggcttcaattaaacgcataacattaatggcctgtgacacagtaacaggactctcttcaccaaatgcaatcgcacgataaatttgctgataataagcgggataattacctgatagagtcggtaactttgttgttactacttcaccactctctgtcgataatgttaattcaccctcttgaggatcagccccccagttatacatttccgtcgggagataacccgcttttaatgcatcttcttgggtatctaaaccatattttacataactgcctttggtcccatgaatagcaaaaataggcgtaggtgaggcaaccaacatagaggcatgtaaaataactttcagatgaccatagtctaatagtgtatgaaagtagtcagcatttttagcattagggcgcaactgagcaatatcagcagtgattgcataaggttgaccaaaaagacataccgcttggtctagtaaatgaggggccagatcgtaccaaagtcctccaccaagtccggcatcttcacgccaacgttggcgcacagcgggtctaaaacgatcgaaatgcgcttcataggcactgacttcacctaatgttttatcggcgagtaatttttgaacggtaagaaaaccggcatcccaacgacgattatgaaaaaccgagagtaatctcttagcttctttcgcttgttgtgccaatttttctgcttcatcgagtgtcaaagtaaaaggtttatcgacaacaacatgtttaccgttttttaaggcttgtgaggcgtaggtatagtgagtgttattaggtgttggaataacaattaaatcgatgtctggatcatcaatcagtcgttgtgggttagcatacaccgtaatattaggaaaatcagcgataactttactttcatcagagcttgaaatggctgatagtgttaacccctcagtggtacagatcaggggagcatgaaaggttttacttgcataaccatagcctataatccccacatttaaattttttgtcataaccctatcccgcttttatctttttattctataaatgaaaaatgactttcacttctacagctaaataaataataacaaagtttgtgataatatctcgtttagaacttagtataatagtaggatctttgattaatgaaattaaaacctcagacaaacgttttgccccagcaatcccctaaagcccctattacgggttggttacttgcccctttggcttatttgctgttgtcgatagtgggcttaggtttaatgtctgttttatatttaatacgatatttttcagatttttcgattatccaccagctaccttttcatgtggtatcaagctggtatctttccgtgttaacaacatgggcgatgtttgcatttaccgcttatttattaagacagttcttttaccgcgctaaaaattttcctcgtttatttattatttggttattaattaacttattgttggcgataaaaagtttcggttttgcccctgttgatgatcaaaccgcggttaagtcactattatgggccgttatggcaactgtctgctttgtgccttatatcaaatatgctaagcgtgtccgtgaaactttcacacaagatcgataacttcatacatttcagcttgatattatactcgcccgtttagcctctttattttatgaggctttttctccattttttaacaattttggcatagcaatgactgattacttgcttttattcgttggtaccgtcttggtgaataactttgtactcgtcaaattcctcggtttatgcccatttatgggtgtatcaaaaaaattagaaaccgcgataggaatggggtttgcgacaacgtttgtcatgacgattgcctctattagctcttggctaatggatacctttattttagttcccttagacttactctatttacgtacactcagctttattttagtgattgctgttgtggtgcaatttacagaaatggtcgtaagaaagacgagtccaacgttatatcgtctattggggattttcttacctttaattaccaccaactgtgccgtattaggggtcgcgttactgaatatcaatcaatcacatacctttatgcaatcagcagtatatggttttggtgctgcggtaggattctccttagttatggtgttatttgcagccattagagaaagactggctgtcgccaatattcctgctcctttcaaaggctcttctattggcttaattactgcgggtttaatgtctcttgcctttatgggttttagtggtttggtgaaactgtaatgaattctttatggatagcaattggtgtactgggtgtactagggcttctattcggcctgattttaggttattccgctcgtcgctttaaagtagaagaagatcctattgtggaaaaaattgatgccatattaccacagagtcagtgtggtcagtgtggtcatcctggttgccgcccttatgcagaagcggtagctaataatggagaaatgattaaccgttgtgcaccgggtggtgaacaggttatgttaaaaattgccgaactgatgggggttgatccacaaccacttgacggtgatgaagaagcattaaatccggtgagaaaagtggctttaattgatgaagacaactgcatcgggtgcacaaaatgtattcaagcatgcccagtggatgccatcgtcggcgctactcgtgcaatgcacaccataatagaagatctctgcacagggtgtgatttatgtgttccaccttgtccaacagactgtattactttagttcctgtgaaaatgacgacctctaattggaaatgggatttaaatactatccctgtaagaaatattcctgcagagccagaagaaacacccgaagatgaaccgtcattaaagacggaggataacgctcatgtttaatctcttttcgttatttaaaaaagataaaatttgggattttaaaggcggcattcatcctcccgaaatgaaattacaatcaagtcgcacgcctatgcgtatagcccagttaccggatgaggttaccatccctattcatcaacacttaggtactcctgggcaactttgcgttaaagtgggtgatcatgttttaaaaggccaagccttaactcgtggtgtaggaagaacattacccgttcatgcttctatatcaggtacggtcacggcaatagagccatttccaagcactcacccttctggtctgcctgaaattgcagtgaaaattgtctctgatggtaaagacgaatggcgagaaaaatcaccactagttgactatcaatcacaaagtaaagaagtattgcttacccgtattcatgaagcaggcattgctggattagggggagcgggttttccaacagccacaaaattaaaaggtggtggtgatttagttaaaacgctcatcataaatgccgctgaatgtgagccttatatcacagctgatgacagacttatgcaagagcacgcagatgaagttattgcgggttgtcagatattaatgcatatactgtcaccggatgaagtgctgattggtattgaagataacaaacctgaagctattgccgccttaaaacaagcattagcagcactcacaaatgaaaaacgtatttttattcgggtgatccctaccaaatatccatctggaggcgctaaacagttaaccaaaatattaacgggcaaagaagttccttctggcggtcgctcctctgatattggcgtattaatgcaaaatgtggggacggtagtggcaattaaacgtgccattatcgatgatgaacctttaattgaacgtgtcgtcaccgtaactggacaaggggctaaaaccccaggtaacttttgggcacgtttaggtactcctatttatgcacttataaaacaagcaggctttgttgctggctctgagcagatggtcattatgggggggcctttaatgggcttcaccttacctgacttaaatgcccccgttataaaaattactaactgcttattaattccctctccagaagagatggatacagataatattgaagaagcctgtatccgttgtggtcaatgtgttgacgcctgccctagtggtttactaccacaacaactttactggtttagtaaagggaaagagcatgagaaagcgcaacaacataatttatttgactgcattgagtgcggggcttgtgcttttgtctgccctagtaatattccattagtgcaatattaccgccaagaaaaagcagaaatacgagaaattgatgcggaagctaagcgagcggctgaagctaaggctcgctttgaagcgaaaaaaatccgtatggaacgagaaaagcttgaacgtgaggcaagacatcaacgtgctgcagttaagcttgatgatcaccaacaaaatgaagtgcaatctgcactttctcgtgtaaaagaaaaacatagcattggcaaaattattgctgttaaagcaggagaacaacctgacaacgcagcggctattgctgcacgcaaaaaacgtaaagaagaagcccgagcaaaacaagctgctaaattggcacaacaggtaccacaaaatacccataccaccgccgatgcagaaagtgatccgcgcaaagccgctgtagcggcagcattagctcgtgtaaaagctaagaaagctcaacaagcgcaagcaactacaaaagtagacactcctgctgaaactcaggctgaggtggaaaccgatccacgcaaagccgctgtagcggcagcattggcccgcgtaaaagctaagaaggctcaacaagcgcaagcaaccgcaaaagtagacacacctactgaaactcctgctgatgctgagctggaaatcgatccgcgtaaagctgctgtggctgctgctattgctcgggtaaaagctaaaaaatcccagcaagcgcaagcaactgcaaaagtagacactcctgctgaaactcaggctgaggtggaaaccgatccgcgcaaagctgctgtaaccgcagcattggctcgggtaaaagctaagaaggctcaacaagcacaggcaactgcaaaagtagacacacctactgaaactcctgctgatgctgagctggaaatcgatccgcgtaaagctgctgtggctgctgctattgctcgggtaaaagctaaaaaatcccagcaaacgcaagcaaccgcaaaagtagacacacccgctgaatctccggctgaggtggaaaccgatccacgtaaagctgctgtggctgctgctattgcccgcgtaaaagctaaaaaatctcaacaagcacaggcaactgcaaaagtagacacacccgctgaaactccagctgatgctgaggtggaaaccgatccacgtaaagctgctgtcgccgctgctattgctcgggtaaaagctaaaaaagaagcacagcaacgccatgctaaagaagaagtgacattggattaatacaaatgaaatttagaccaatacaaaataacaatagcaaattgaaaatcgccagctctccatttactcataatcaacaatccaccagtcaagtgatgttgtgggtaatattggccgctattccaggtattctatgccaactctacttctttggtttagggacgctatatcaaatcatcttggcaatcattgtcgcgctattggcggagactatttgtgtcaaactcagaaaagaagatccacttctatacctaaaagataattccgctttactaacaggtattttactagcaattagtattcctcctttagcgccttggtggataattgttttagggacattttttgcggttgttattgccaaacatatttatggcggattaggtcaaaacccatttaatcccgcgatggtcggttatgtggtgctattgatctcctttcctgtacaaatgacatcatggatgccccccattgaattacaagccgtatcttataactttatagatagcttaagtattttctttaccggacatacaccctcaggactcacccttgaagatttaaggcgctctgtagatggcattacccaagccacaccacttgatagttttaaaaccggattattaacccactctattgatgaagtattagcaacgccaatcttacaaggtggatttgcgggaatgggttggcaatgggtgaatgttgcctatctggttgggggcgttatcttgttatataaacgaattattagctggcaaattcctgttgccatgttaacgctgcttggtgtttgttcactgatcagttgggggatcgatgctactcgttactctcagccactattacagcttttctcaggtgcgacgatgttaggggctttctttattgccaccgatcctgttagcgcctccaccacaccaaaagggcgattaatctatggtgcaatcattggcctattagtgtggattattcgtgtctatggtggctatcctgatgccgtggccttctcagtcctattagctaatattgctgtaccgcttattgatagttatacccgtcctcgggtttatggacattaatggagataatgatgatcgagatactaaaacgtcatgggttaacattagctatctttgcggcctgtaccacagggttaacggctgtcgtctatcacttgacggcgaatactatcgcagaacaagcggctttagaaaaacagaaattattagaccaagtgatcccaacctctctctacaataaccatctcgcgcaagattgttatattttgacagataaagcattaggtaatgaaaaaccacataaactttatgttgctcgttttaatggtaaacctgtcgccgccgcattagaatcaacggcacctgacggttattcaggggcgattgaattattggttggtgctgattttagtggcaaagtactcggtgttcgcgtgacaacacataatgaaacaccggggctaggtgataaaatagaaacgcgtatttcagattggatttactcattaagtaacaagtttattaccagtgctcatgactcacattgggcggtaaaaaaagatggtggtgattttgaccaattcactggagcaactatcacaccaagagccgtcgttaatgcatcaaaacgcactgcatggttaatacaatctttacctgaaaaattagataccctttcagcttgtgaggcgaattaaaatgagtatgatcaaagaactgttttcacaaggattatggaagaataactctgctttagttcaattattagggctgtgcccattactggcagtgtcttctaccgcgaccaatgctttaggcttaggtctagccacaacattagtattagtttgtaccaatgtggcagtgtctagtttacgtcgttgggttccctctgaaattcgtattccaatttatgttatgattatcgcatccgttgttagtgcggtacaattgcttatcaatgcctatgcttatggtttataccaatcgttaggaatatttattcctcttattgtcactaactgtattgtgattggtcgtgcagaggcgtttgcagctaaaaatgaagttttcccttcagcaattgatggctttgctatgggattaggtgcaacagcggcactttttgttttaggggcaatgcgtgaaatattaggtaatggcactttatttgatggtgctgatttattattaggtgaatgggcgcaagtattaagggttgagatagtacatttagactcacctttcttactggctattttaccacccggtgcctttattggtttaggttttatgctggccataaaatacctgattgatgaaaaacagaaaaaacgcgttccatccacgaccaaaacctatgaaaaagaacaaggttgtggcagtcatattgttaaaaactaatttgtgagcataatgaatcaagctaaacgtatagaaattttaactaggttgcgggataacaatccgcatcctactactgagttaagatttaactccccgtttgaattattgatctccgtgttactctctgcacaagccaccgatgttagtgttaataaggcaacagcaaaactttaccctgttgccaatacaccccaagcaatgctggaattaggtgttgaggggatcaaatcctatattaagaccattggcctatttaatacaaaagctgagaatgtgattaaaacctgccaaatattggtagataaacatcatggccaagttcctgaaaatagagaggctttagaggcattacccggtgtcggtcgtaaaacagcgaatgtcgtacttaacaccgcttttggttggccgaccattgctgttgatacacatatctttcgcgtgtgtaatcgcactaaatttgcaccgggaaaaaatgttaatgaagtggaacaaaaactgctaaaagtggtaccggcagaatttaaagtcgattgccaccattggcttatcctgcatggtcgttatacctgtattgccagaaaaccacggtgtggctcttgtattattgaagatctctgtgagtataccgaaaaaacagatccacaataacattgtgcaaatttctctgtttttctgatgcatattacttgcgtcattacacacaatcgaataaaactattgcccacttttattattaaaattgccgactttccggaaaaatatgtttcaagacaatccgctgcttgctcagctaaaacagcaactccatgcccaaacaccgcgcgtggaaggccttgtaaaagggacagataaaggctttggcttccttgaagttgatggtcagaaaagctattttatccctcctcctcaaatgaaaaaagtgatgcacggtgatcgcattattgctgccgtacatactaataatgataaagagtccgctgagcctgaagagctggtagaaccctttttgactcgctttgtcggccgtgttcagaaaaaagaaggtgataatcgtctatggattattcctgatcaccctctactcaaagatgccattccttgtcgtcctataaaaagcttaacgcatccatttgccgatcaagattgggcagtggcggaaatgcgccgacatcctcttaaaggtgataaacattttcaagctgaattaactgattttattaccgataaagatgaccattttgcaccttggtgggtgacattaatgcgtcatcaattagagcgaaatgcacctgaagtagacagtgaaacattaaccttacatgatgatctaccgcgtgaagatttaaccgcgctctcctttgtgaccatcgatagtgcttcaaccgaagatatggacgatgcgttatatattcgtaaagaagaaaatggccaactttcactgtatatcgctattgccgatccaacggcttatattcagcctaatagtgaattagataccattgcagcacaacgagcgctaacaaactatctaccgggctttaatatcccgatgttacctcgtgagctatcagataatctctgctcattgcgccctaatgaaaaacgtcctgcgttagtctgccaagtgggtatcatggaggatggtgcattaaccgatgagatccacttctactcagcatgggtagaatcaaaagcaaaactggtttatgacaatatttctgattggctagaaggtgaagaaacacagtgggcacctgaaaatgagattgttcatgaacaagtcatgctattaaaagagatgagcgagaaacgtcatgtatggcgtgaacaacatgctctcgtctttaaagagcgtcctgactatcgctttattcttgatgacagtggcaacgtattagatatcgtggcggaaaaacgtcgtactgccaaccgtatcgtggaagaagcgatgatcaccgccaatatttgtgcggcaaaggtacttagtcgcaatctcggttttggtatttataacgttcatactggttttgatccgctctatattgatcaagtctcacaaaccttaaaagagcacggtattgaaaccaacgcagatgagttattaacccttgaaggtttctgtcgcttacgtcgtgaactggataatcagccaaaccaattccttgatagccgtattcgtcgtttccaaaacttcgctgaaataaaaacagagccaggtcctcactttggtttaggccttgaagcttatgcgacatggacatcaccgatccgtaaatacagtgatattttaaatcaccgtttattaaaagcgattatcagcaaaagtgcggcagaaaaaccgcaagatgaagattgtgttcgtattgccgaacgtcgtcgtgctaaccgtatggccgagcgcgatgtcggtgattggttatatgcgcgcttcttaaaaccttttgctggcactgagagtacctttaatgccgaaattattgatattactcgtggtggtattcgggtacgtttagttgaaaatggggctattgcctttattcctgcaccatttttacatgcggtacgtgacgaaattcaatgtagtcaagaaactggctctgtcattattaaaggtgaaacagcctataagctcaacgacattattccggtacgtattgaagatgtgaaactagaaacgcgtaatattgttgctcgtccgatttaacagctatttagcgtaatagatattatcaagctgataacctactcaggttatcagcttttttatttattgcattttgcgactctacagatatataaagtgacactgtcaccactaaaactagtttgctaataataaaaatgcgccgaccttcaacaagataagcgcactatatgtagaatactaggcttcaatcgatgattggggttgtgataaagaactaccttagcctccggccaatttcactttcatccctttcgcttctaataaagatttaattaaatcccgtttatcaccttggatttcaattaatccctctttaacactgccaccacaaccacatttcttttttaattcagccgctaatttagccagagctgcatcatccaaatcaataccggagataacacaaacacccttacctttacggccactggtttgacgttggatacgcacaataccatcaccggcggggcgtgtaggtttctgctcttcttctttaatccgaccaatatcagtggaataaaccagccgagaattattatccatgttgcacaacaccttgtatagaacgattaatttgctgtaaagtttccagtggattttcactgcgtgtaataggtctgccgatcaccatataatccaccccagccactatcgcttgctctggcgtcataactcgacgctgatcacccacttcgctccccgcgggtcgaattccgggagtgaccaataaaaagtcatcaccacacacttgtttaaaacgagtggcttcatgggccgaacataccacaccatcaagaccacaggctttagccagtaatgctaagcgttcggcttgttctgctggagttaggttaatgcccaattcagtgagatcggattgatccatactggtcaacacagtgacagcggttaatagcggtgcctctttgccaaatgatcttaagctctcctttgccgcacgcatcatacgactaccaccactcgcatgcacatttaccatccatacccctaaatcggcagccgcggcaactgctctcgccaccgtattgggtatatcatgaaattttaaatctaagaaaatatcaaacccttgctgttgcaattgcgttacaaattgcggtccaaagcgagtaaacatctctttaccaattttaaggcgacaagatgaagggtcgataagttgtgcaaaatcgagtgcacttttttggtcttcatagtctagtgccacaataacgggcgcgcaggtagagctgggcgattttttatcacaatcaaatgacattttaaggcctttatttatcaagagactattaaaagtgacatcgtcactgaccatctaagccacgtatcggcttaacggtatcccaagagcgacaggatggacaatgccaatataatgcatgggaggtaaaaccacatttatggcaacggtaatcaggttttgtgcggatctgctcaccgaccatataacgtaataagatcaggctctcttttgcgcgtccttcttctgcttcagctaaatgatagcgcattaaacgatagaaaagtcgcatggtaggatgacgttctagttggcgattaatatataactgtgcagcttcaatgccctctttctcttcaataatatcggcaagataaagctctgcaatggcaccacaattactctcgacacattgacgtagataggcttcccaacgtgcaggatcaccttgagattggaagcattcaaaaagcattggcaaggtttcactgaccatctctttatcttgctcaattactttcattaatacatcaatggctttatttttttcatcgcgcgcgatatagatacgaccatacataatggaaacacgggcacaaagtggatccatttgcccggctttttgtagaaaacttagcgcattatcaagattatcactgctcatttcttgcaatgcgagttcacaatagaaatgggcaatttgctctttaagttcatgttgacccagttttaccaatttctctgcggtttctatcgccttaccccagtcactggtaagttgataaatggctaggagggattgtaatgcactttgacgaaaatcctgctcatcaatcagctgtaaaaacatatgttcagcgcgatcataaacccctgctgcgacataatcacggccaagttgctgaatagcgagaagacgttgttcaaaagagagtgccgcgctctccattaacgattggtgaatacgaatcgcacgttcaacttcaccacgagagcgaaatagattacctaaagtaagatgtgcttcaaaggctgagctatcctctttaagcatttcaaggaacagatcaaccgctttgtcttgttgatcagaaagtaaaaagttaacccctgccacatattcacgtgacaggcgatcggcattttgctgtttatcctgttgcgcaccacgacgccccatataccagccataagccgcagcgaccggtaataacagaaacagcaactcaagcatctattctcgtccttattttacagtagaaacggctgtagaacgattttcttggctttcttgtttggtttgttcactttcaaggcgcttaattttacgctttgctcttactaatgataaacgtactcgcaagtaaaaaacgccactgacgatccagcccagtacaaaaccaacaccaaacagcgtggctaataaagtagagatacgatattcaccttgagcaataagataattgaaggtgatcacctgatcattatttgaacctaacgtcatggctattacgacaatagctagcaccagaacaaccaaaataaaaagtagaactttcttcacattatttcctttttattctcttttctttggataagggataaaggtagcattttcaccactcacaaagaaagtcatttcttagaatcatctgattttcgtatattttttcacataaatagtgaaaaataaattcgctatctcaaaaagaaaaacgattatcaaggttttaacaacaatcgtcgttcaatcatccaaaatgcacaccacaccaacacagcactaatcagaataccgacaatcacatcagatgcccagtgcatacctaatattattcgtccgacagtcacatcaataccccataatatccctaagctggctaaaaaataatgacgtcgtaacatacacagcacaaacacaaataaagccagtgttgcagagaataagctgtgtccagaaggaaaggcataaccggtttctgctcgccaatggcttaattgccattgagggatcagcgacgaatgagataatccattatgcaacagttgctcacgctcaggacgagacacttggtaaaaatgttctggtgatattgatagttggttactgacccaaaccacataaggtcgtggctctttaacgctattttttacagccactttgatcaactgccccaacatcaaagtcgcgaccataataattgctaactgaataaatgcttttttaggtagtttaagaataaaaaagagcaaaacaaggcaaagtaatatagttaaagctccccaaggtttagccgcactattggctatccataaagtgctttcgcctcccagaggatgtgctgatggttgccattgccatcccagaataagcaccacaataggtacaatcaaaagcaatccacttcctaaaagcatcaatactgatatttgcttattcaatctatttgtccttatctattctgtatgcactgtttttatttactgatgattaactgatataaatgattagtataaacaataccagtttagcaataaataattatgcaagtaggcttaaaatctgataatttgtttaggtgtgatttattaagtgtgtgttatcaaattccctgccgatttagacaaggaaccatttcagtgttttatttctctttgtcctcgttataaagtgtataatcttgaacgagagtatcacctgaaattatgagtcaaaaataatgaaattaagacgtatcgcagaagcaaaactccctactccttttggtgagtttttaatggtgggttttgaagaaattgccacaggaaaagatcatgttgccctcgtttttggtgacatttctggcacaaaacccgttttatcccgtattcattctgaatgtttaactggcgatgcactatttagcctgcgttgtgattgtggttttcagctagaagctgccctttcacaaattagcaaagaaggccgtggtgtattactttatcatcgccaagaaggtcgcaatattggtttacttaataaaatccgcgcttatgcattacaagaccaaggattagatactgtcgaagctaatctaaagttaggatttaaagctgatgagcgtgacttcaccctttgcgctgatatgtataatctattaggcatacatgaagtacgattattaaccaataatccaaagaaaatcgaaataatgaaagaagctgggatcaacgtggtagagcgtgttccattaatcgtaggacgtaatccaagtaatgctcattatcttgatactaaagcggataaaatgggacatatgttatttaaaaaagcgcaataacataaatatcggatagattatcagcgttattattcaatccgggtgatttagcccggattttattttcctgcacttacccccatcaagctactgactattttcaagatgatttttttatcctttaattattaaattatatcatgtgaaattttatcatatggcaagctgttgactctttaactggctttaagctatttataactaaataatttttaataggaatagcataatgccattacatttttctggtaggatttttgcgtctcttttattagctgggacactattaacaggttgcgataacaatgataacaaccgttatgcaattaaagtgggggtgattaatggtgcagagcaagatgtggcagaagtcgctaaaaaagtggctaaagaaaaatatggtttagaggttgagctggtgggttttagtggctcattgttacctaacgatcccactgcaaacaaagaattagatgccaatgtgttccaacatcgccctttccttgagcaagataatcgttctcgtggttataacctcgtcgcggtaggcaatacctttgtttttcctatggcaggttattcaaccaaaattaaacatcctcaagaattaaaacccggtgatacaatagcactgcccaatgatccaaccaacttggggcgcgcattattattgctacaaaaagagaaactgatcaccttaaaccctgacagtggcctattacccacaacactcgatattattgataatccacttaaattaaatattatgcaattagaaggtgcgcaactaccacgagtattaaacgatccccaagtaacagttgcgataattagcacaacttatatccaacaaattaatttatcaccaaccaaagacagtatttttattgaagataaaagttcaccttatactaatattattgttacaagagaagataataaagaagcagagaatgtacgcgattttattaaagcctatcagtcacccgaagtggcaacagccgctgagactatttttaaaggtggtgctattcaagggtggtaaacacgacttataatttatcaggtcacttataataagtgacctatttattaatagttatgacccaaaataaaactttaatttattattttcatctgctttaattgatacttgaagatcattaccatattgatcatatataatacaattcatttcttcatctttcctactggatgtaaacgcttttccatattctatactatagctccagaaacataccccatcctcatcatttgctgatgtgaccggaattaaagtatctggtttaaaatggaattccttagtgtaataatgaggctttaatggaatttttttaatatatttatcagtcgatgtgctaataatctgataatgacctttttgaaaataatgaaaagatttattttcttcatactctacactcttagttatcgttctattattaccgttaaaccttagataatatttcgtcaagacatcacctgatgtttctacatctttttctattctaggatttaccagcggttctatgtctacatctgcttctgtaaatattttttttggtgcaacgtccagaatgataaaatttaaataatcactgtaattatttttaaaggctgtagtatactcttttcctttaatgtgagtctgtgcacaaattctaaaggtatctatcactttattaacagaaagataaataacacaagtagatgcatcaggggagttcaatgttgcttcttcactgcttggaaatacaaatccattttctttatcagataaagaaatatcattgcggtcaataggaagatttttttcatttacaatatgtgtatttctataaatatcttctttggctatttttatgatacgaccatttttatctaaagcctctatataaatagtaataggtacctgatgtctaccattaacatatgcagtcgctgtactgttatatctattaatataaatataaaatgctcttagttcatcaatatcatcccaagagccaaattggctcttaataacctcacctttcgatacaattgtatttccctcaacagtcgcataaccagtcacccaaccatttttttcaactattgcatcaccacgaacaatagcatattctgatactttagcattatctttaataacagcattatcatatattacagcatcgtcagatattctcgcattatctttaataactgcattatcatatattacaacatcatcagatattgtcacattatcttccactagcacattaccataaatctctgcattgtcttttactttactatttcccttaactattgcattaccgtagatcttcacattatttcttataattgcattatctgtgactttagcattaccaaataccattacattatcaaaaataaaacaattatcatctctacttaaattactttcattttctatccatcctcctggactatctgtatacactcttctaattctatataaagtaacaccattatattcttttgtttcactcgttattttatatttcttcataaacacctccataataacaccctgttaatattgttatattaacttgatactcattaaaaatacgtttagcatttaatggttagtttatagtattagatgaaatcatttgtcgatattatgaaatataaaaatattctattataaaaaagaaagcgaagaattaattcatcattcttcgccaactaattaatacttactaaattattttacaacatattacgaataacataatgcaagatcccgccatgttcaaaataagccagctcagtttgcgtatcaatacgacaacgagccataatagtttcttggcgaccatctgcaaaagtaatattgacagcgacatcttgacccggtgttagcgaattaagccccgttatctcaattttttcatcacctttgagccctaaagtctggcgtgatacaccgttaggaaattctaaaggtaatactcccataccaatcaaattagaacggtgaatacgttcaaacgatccggctatcaccactcgcacacctaataatcgtgtacctttggcggcccagtcacggctagagcctgatccatattcattaccggcaataatggctaaaggcgtattttcttgctgataacgcatcgccgcatcataaatggctaacgtttctcccgttggaatatgttttgtaaagcccccttcgatccccggcaccatttcattacgaatacggatatttgcaaaagttcctcgcatcataacttcgtgattaccacgtcttgaaccgtaagagttaaagtcttttggttcaacaccatgctctcgaagataacgcccagcagggctatcggctttaatattcccagcaggtgaaatatgatcggtggtcaccgagtcacctaatatggctaaaatactggcttggtgaatatctttaatcgcctctggtgtttttgtcataccttcaaaaaaaggaggatggcgaatataggtagaatcaggttgccaagcatatacaggggtatcttgtatttttagtgattgccaagtttcatcaccatcaaataccgcagaatactctttatggaacatctgcgtttttactttttccaccgcatcggcaatggctttactgtcaggccaaatatcttttaaatagactggattgccctgcttatcttcacctaatggctctttggtcaaatcaatattcatattaccagatagcgcataagccacgactaaaggaggggaagcaagccagttggttttcactaaaggatggatacgaccttcaaagttacgattacccgatagtacagcggctatagttaaatcattatctttaatcgcctcttcaatcggggctaataaaggccctgagttaccaatacatgtggtacaaccataaccaaccaaattaaaaccaagtttatctaaataaggtgttaatcccgccagtgctaagtagtcagtcaccactttagagccgggggctagcgacgatttgacccatggcttacgctgcaggcctttttctaccgcatttttagccagtagacctgcggccattaaaacattagggttagaggtattggtacatgaggtgatcgctgcaattactaccgcaccatccgttaaggtaaaaggtggctgattatcaatggtgacctgaggatattgagcaagaggttttttatttgtttcaagctctactgcagctttaaatgcttttggtacattcagcaaattaactctatcttgtggacgtttagggccagcaagacttgcttccacagtacccatatctaacgataaggttgaggtgaaaatgggttcatcaccggcatgacgccataagccttgctctttactataggcttcaactaatgcaatttcttgctcttcacgcccagtaagacgtaaataatctagtgtaatttcgtcaataggaaagaagccacaggttgcaccatattcaggtgacatattggcaatcgtcgctcggtcagcaagaggcaaagaagctagtccatcaccataaaactcaacaaatttccctaccacaccatgttgacgtaacatttgcgttacggttaatactaggtcagtcgctgtgatcccctcacgtagtttacccgttaacttaaaacctaccacatcagggatcagcattgagatcggttggcctaacatcgcagcttccgcctcaatgccaccaacgccccaacccaacacgcccagaccattgatcatagtagtatgtgaatcggttccaaccaaagtatcagggtaagcaatatgtcggccattttgttgttcagaccatatcgctttacctaaatattctaagttaacctgatggcaaatgcccgttccaggaggtactacacgaaaacgttcaaacgactgttgcccccaacgtaaaaagagataacgctcatagttacgctgcatttcaatttcaacgtttttctcaaaagcatcatcactggcatatttatcaaccatcaccgaatggtcgataaccaagtcaacaggagaaagtggattaactttttctacatttccccccaaagattttacggcttcacgcatagcggctaaatcaacaacggcaggtacacccgtaaaatcttgcattaatactcttgctgggcgataggcaatttcacgggaggcgtgggcatttttttgccaatccaccaatgccttaatatcatcttcaacaaccgtatcatcatcaagatagcggactaaattttctagcagaacctttaacgatttagggagacgagtgatatcccctaattgacgagcaacttcagaaagacggtaatactcatattgatgagtacctacagagagagtagaaagactctcctttttcagacgtaacgacatagctcctctccttcttatttttatgctgacagcaatcacaaactatcaaaataggtaaggttatctattaaccatatcatagaaagagaaatttcgcttacggaccacacgatttgttaatatgatgttattgagattatattactaacaaaacttaatctctttcttttaacttaattaggatttaatgggggtattattgcaaataaaggataatgtatatgaacaatcaacaagccgaacaactaaaaaagattatgatggctgatagttattttgcacaacctattacgcccccttttccacagcctttagcaataaaatcattacaacagacacttaatatcaaagatacagaaggacttgttcaatttattatcgcttcacctaaacgttttaacgaatcagaaaaaatgatcatgacacaactgaaagatatacaaattgccttaatctctattatgtcgaatcatctttcagtattgaaaaaagaagatagtgaagcttattatcaaccagagcattggctagaaacccttaatcatttacctttgcttagccgtaataaagttgaaagcaaacgacttgataagcaaacatttgatttttcaattgctcaagcctttgtgcaactgttattaggtgcagccattaatgcagcgtcaccgtcattagccgagtttatcgattttttacgcaatcagggacaacaaattgaactaggaatacgccaatcctttgatagctataaaacgataactattgcaggtgtgacggaaatccttaatcataataatcagcttatttttgtacctaaattaaaaataatgagtctacgtttctcacatcgaacagccaaaatgttattagccagttgttcggggcgaaaatttacgatttcagtagaatacacaacaatcacctcaatttttgatattggtgcacttaatgatccgctgattaatcgacaattttatgcttttttaaataagtttcgtcagttgagtattactcaatctgattcattttttagtggggactttttattgcaatagcattaatgttataagttacataatggtaaaaggcgggataatatacccgcctttgcgtattaaactaaaggtaactcgatatctttaaataactcttcaatttcttcattggtgcgtaaagctgtcgcttgttccaccaaattacgtgttagatgtggggcaaaacgccacataaagtcatacatataaccgcgtaaaaaaccactacgtcgaaatgcaatttttgtggtgctataactaaatttatcacgcatatcaatagcgactaaatcgctatcaagcatcggatcaaatgccatactcgcaatcacaccaatacctaagtgtagcctgacataagtttttattacatccgcatccgttgcagtaaaaacaattttaggctttaaacccactttaccaaaggcttcgtcaagatcagaacgcccagtaaaaccatgggtataagtaacgatatcgtaagttgcaagctcttgtaaggtaacttcacgcttttgcgccaatgggtgatctttagttaccaccacaatacgattccaacgataacaaggtaacatcactaaatcgttatacagatgtagtgattctgtcgctatagcaaaatcacttttaccacggcaaacatcttctgcaatttgtgtcggtgaaccctgattcatatgtaatgacacttcgggataacgttctataaaacctttaatcacagggggtaaaacataacgcgcttgtgtatgagtggtggcaatagaaagcgaaccgcgatcaggataagtgtgttcccctgcagccgagcggatagcttctgttttggataatatctcacgagataatctgacaatttcttcccccgctggcgtcacatgtgttaagtgcttaccactgcgagagaatatttgtatacccaactcatcttctagcatacgaatttgtttactgatccccggctgagaggtatataaacgctctgctgtcgttgagacgtttaaatcgttattcaccacttcaacgatataacgcaactgttgtaatttcatagaagcacgatccctttacaaaagacttattattctgttattccgctcatattcatataactaaaaagaataataaataagcaatatataaccactatatcacttatttcatttcggtctaacgtaattaataaggttatttaggttttattatatcgaatagttataagctataaaaatcggtagaaatcttgctgtctctggatggtcttgattgtattgtgataataacaatttactgattcgatttgctgttaaaaccactgtactattgcctagtaagcgttggaaagtacagtaaacggtcaggagcaacagaatcatatttaacgtaatgtacatacatagaagatgatcaccatcgaaggttagctcatatcaaataaatctataagattgcatagttaaattaatagttgaattagaatagtaacctattgattaatcaatatatctaacaaaagaagtaaacgatttctcatcactattctcgattatttcattaaaactaacccttccagtataaatagaaaaggtcggttctttaatactcccattaggaaaaataactttttcatcttttgagatagtcgtggttagtttaggctcaactttataattaaaataaatttctccatttgatttattagatagttttttctcaccttccgtgattgatggtgaataatagatagattgatcatcttcttccactataacaggggctaatgtagtaaatagttctatttttgaatgtttgttatcgacaattgggataaccttactaatcaccatatgatttttataaatggtagagattggcgctagttctatttttatcaatttccaattacaccatcctcccccatcgataggcacggtataggtcgcgtttttattatcctctgctattttacgttctacctccactttttgtgttaaagaggagtaagagacttcggtataatcagcattaaaatgagaacgttggcatttatttgacgtataagtacctcggacttgcactactgtttcaggggaaatagttgaataaaccgtgattttattgccatcattattcatattgacggggaatttattatcaagatatatattgataagcccactacaaccacctaacaatagataaggaataagaacaaataatttaatcattgtcattagcatagttaatccccattcaactccgttcacctgcttaaaatcgcaatcgcatatcccttcttacactttagacagcaaaaaactacttactcccccaaacagattaatcaatcaatatatctaacaaaagaagtaaacgctttttcatcactattctcgattatttcattaaaaccaatcattttactataagtcgaaccactcagtgttttaatattgccgttagggaaaatagctttattatcctttgagatagtcgtagttagtttaggttcaactttataattaaaataaatttttccatttaatttattggataaactcttttcaccttctattcttgatagtgaataatagattgattggccattttcactttcaatcattataggagctattgttgtaaataattctactctcgaatattcactattaacaataggaaaaacaagagtgctaattctatcttgtttgtatttcaccgatattggtgctatatctatttctttcaacttccaattacaccatccccctccatcaataggcacgatataggtcgcgtttttattatcctctgctattttacgctctacctccacttgttgcgttaaagaggaataagtgactttagtataagaagcattaaaatgagaacgttcacacttatttgacgtataagtaccaataacttccactactgtttcaggggaaatagttgaataaaccgtgatttttttgccatcattattcatattgacaggaaatttattatcaagatatatattgatatactcaccacatccacttaataatagataagggataaaaataagtgatttaatcattgtcattaacatagttaatcccattcaactccattcacctgcttaaaatcgcaatcgcatatcccttcttacactttagacagcaaaaaactacttactcccccaaacagattaatcaatcaatatatctaacaaaagaagtaaacgctttttcatcactattctcgattatttcattaaaactaatcattccagtataaatagaaaaggttggatctttaatgctcccattaggataaataactttttcatcttttgagatagtcgtggttagtttaggttcaactttataattaaaatagatttctccatctgatttattggataactttcgttcaccttccgtgcttgatggtgaataatagatggattgctcattcttgccttctactataataggggctaatgtggtaaatagttctatttttgaatgcttatcatcggtgattggaataacttcactaattcgcatatatcttttgtgaatggtagaaactggtgataattctatttttactaacttccaattacaccatccccctccatcaataggcacgatataggtcgcggttttattatcctctgctattttacgctctacctctactttttgtgttaaagaggagtaagagacttcggtataatcagaattaaaatgagaacgttcacacttattagatgtataagtacctcggacttgcactaccatttcagggtaaatagttgaataaaccgtgatttttttgccatcattattcatattgacggggaatttattatccagatatatattgatatactcaccacatccacttaataatagataaggaataaaaataagtgatttaattattgtcattagcatagttaatccccattcaactccgttcacctgcttaaaatcgcaatcgcatatcccttcttacactttagacagcaaaaaaccactcactctcccaaacagattaatcaatcaatatatcgaacaaaagaagtaaacgccttttcatcactattctcgattatttcattaaaaccaatcaatttactataagtcgatccgctcagtattttaatattgccgttagggaaaatagctttgttatcctttgagatagtcgtggttagtttaggttcaactttataattaaaatagatttccccacttgatttattggataacttttgttcatcttccattattgatgatgtgtaatagatggattgttcatctttttcttccactataacaggggctaatgtagcaaataattttatttttgaatgttcactattagtcaatgaaaaaaccatattccttgtaacaaatacctcatatttactagagactggtgctatatctatttttactaacttccaattacaccatccccctccatcaataggtacgatataggtcgcggttttattatcctctgctattttacgctctacctccactttttttgttaaagaggaataagtgacttcggtataatcagcactaaaatgagaacgttcgcacttattagatgtataagtaccaataacttccactactgtttcaggggaaatagttgaataaaccgtgatttttttgccatcattattcatattgacggggaatttattattaagatatatattgatatactcgccacatccacttaataatagataagggataaaaataagtgatttaatcattgtcattagcatagttaatccccattcaactccattcacctgcttaaaatcgcaatcgcatatcccttcttacactttagacagcaaaaaactacttactcccccaaacagattaatcaatcaatatatctcacaaaagaagtaaacgctttttcatcactattctcgattatttcattgaaattaattattctgctataactagatccgtccaatattttaatattgccgttagggaaaatagctttgttatcatttgagatgatagtcgtggttaatttaggttcaactttataattaaaataaatttctccatctgatttattggataatttttgttcatcctccattattgatgatgagtaatagatggactgttcatccttttcttccactataacaggggctaatgtagcaaataattttatttttgaatgttcactattagtcaatgaaaaaaccatatttcttctaacaagcacttcatatttagtagataatggtgctatctctatttctactagcttccaattacaccatcctcccccatcgataggcacggtataggtcgcgtttttattatcctctgctattttacgttctgcttccacttgttgtgttaaagaggaataagtgacttcagtataagaagcattaaaatgagaacgttggcatttatttgacgtatacgtaccgcgaacaagtactaccgtttcaggggaaatagttgaataaaccgtgatttttttgccatcattattcatattgacaggaaatttattatcaagatatatattgatatactcaccacatccacttaataatagataagggataaaaataagtgatttaattattgtcattagcatatttgaaccttttcagcgccgttataccttctggcataagtaatgtgggtaataatgtatctgcaaccataagatctaagtctagcaaataactgctttcatcgtatttggcttgtgatagtcttttttgattgaccaattctgctctaatatcatatgcagattctgttaatccgttatatttaactaaactaattattttagaaataataaagtttgtatatttacgacttgagtggtctccaccaccagttacaccaggtgatgctgttttgggtaacttatatagttcaaaaaattcttgtttaagccgatgatcgggtagtaattcagaaacgagatagagcttttcatcagtatcagagacgagatagcgttttttatctatttccatatttaccaaaagacttggtgcatatccaacacttgccaacacgtatttatacatagatgtttttgatgttggtttgtaaaaatgcacagcatcaccatggtgaataaatgtatcactttttatattgaaatttgttttcaattgatcaatagctttactcgccataccttgatgtttccagtctatatatgttattgcaatttctatagaataccctaaccaatcatgatcacttataaaagcgatattattcatatctttttcaaaaggaagggctggtactggatcgtcttcattgacatgacgatgatgaataatatctcccaactgctctgtaatagaaagggttaatacccgaggcataccaatagtataaagcactggattatattctcttaattttatggcatgtaataaagctaatgccccccctagactatgccctgcgataaataattttcggtttgaagctaaacctttgattaaatttaatggattttcatcatcattctttgaacctattttcggccttaatttatacttaccatccatggtcctaaatgaattataaaaaccagagtgtacatagccttctattcccatatcctgccgcagtttaactggtttaaattttatatctgtaaatatatcagtttttcctgccgttcctcgccaaacaacaataacttccttattatttgcgatataaaacatttgggtatctaaattcttagctgaatcaataaactcaacatctgtatagcgttcactaaacggaacatcatatattatcggggtaaaagattctttcgcaaattgctgtgggatttgggataagtcaaagagttgattaaaaaaaacgtcctcaattgagcctaaataatttcctgcattaggctccttatcattattagctttaaagctcgcataagacaatacagataatatacttaaattacaggcattagtaattgagtaatctttctgatgatgtaataagaatgaccaggctctaaatggacatacttcaaaaacccaacgttcattacgaaatattaccatatatccattgggttgctgttttttaaaatgatatttaggtaactctggttgatcccattttaaaattttaggcgtcgcatcacataaatcaccaatagttaaatagcggtaattatcattacgttgtgttgcatcatagcgaattttggaagaaccatttctgcgtactcttaaaggacgtttttccatttcatcagccagcatttgtgcattaatagaaaagcgcccccctgttggcggtaaatctgtttctctaacaatcccattacgatctgttttacctgttcttttttctcccccagagacagtcagtgtatagggcatatccgaaataggattgttcaattcatctaccagtaagatttctatccaagcattatgtttagcacaatcggggcaataaggatcattatatttatcgtatctaaatgtcatttttcttccttgtcatccttgttatatagtcatatcaggtaatagattatttttatttagatagcgtaaaaataaatcatcatacagataggcggtatctaatctatttttctgacattcgtccatccaatcgcggataaaccctattaaacgaccgtcaacttcatctaactgataagctaattcactctgtttttcccaaaactgaatatagaagttattaattacattaacataagcctgttcagaatcacgccaagctgtaattagatgctctcttaattcataatctacggggctaataaagggatctgcatattgaggtcgcgtatagttttcattaacctcatcaccttcaatcaagcagtcatcaacaggcatcattaagacagcccaatcgccaagtgataattttggtaatagcgtacgcgctatacgcgcatcaaaaaaacgaaagataacttttttatcattcattatcactagttgatgcttttgccaatgagtgatttgggtacgccaatcgagttggctatgataagcccatccccagctattatcacctaatggcatagtatctaatacttggcccaaatgtgagtattgcgagggttttacttttaccaaccatggactgacactcgataagtgtgataatgccgttccacgatatatagggaatgcctcttcaatccaatcattaatataaaattgtttaatcggatttggttgcgataacgtgttaattaaaaaatacacatcactttgaatggtatttgttaaccatgaagtccatgtcagtgacattattcatcctcatttggttttataattattccccctgagtgctgtgctgctactgcacagtatttttttacaggatacggagataactctaaaggagggacgccttgcggtagctccaaatcgatagaagtcccacttcctgcactaccaccaccgacgaccaaattattcgaagtaaatatcatattgggagtgatccgtataaaactctctcccactttaagggtgatttctgtccccgcatcaagcacaattttaccgccactcacaaaataagtttgcagagtgctttcatgcaccgcatttccatttactttcgtcttttcatcaccttcaatatgtaatgatacatttccagtgatatgatttttttgtgagccttttaaaataaagtgatcattacctgcgatttcggtaaattgatcattattaatccgtttttttgcatcatgctgaatatggaaatgtgcgttatgttcaatatgagcattcatatcgtgttgtgcatgaagatagatttcttctcggcctgctttatcatcaaagcgtaactcgttaaacccttctcctttatgcgtttttgttttaaacgtagtacgcgtcatctcataaggtaggtttagtggcggagtattgcgtccattatatgtacagcctgaaattataggtctatctatatctccatttagataactgataagcacttcttgtccaatcctaggtattgccataaagccataaccgttaccattccatccctgcgctacccgaacccaacatgagcttcctaattctggttctcgcatgcgatcccaatgaaaataaacttgtacagccccttcttcattggtatagatttcttcaccttcagggccaactactgtggctaattcatcgccatcagctgttggtttatgaataaaaggcgggcgccaatttaaattatcaggaataaaggttaaattattcgataatgttgttccttgcccttccctattatcagctaagggttgagtgccgtgatgagtaatagcaatgacttgccaacggcgattcatatttgagcatgggtgagaagataacgaaaaaatttttcctggcatcaaagcaaaacaattagttaatgcattgccgacgcaacgttgttgttgtatctcttccattcgaattttggtataacgatctgcatcatcttgcgtctgaaaacgcccataactttcataaaatggatgctgattatgtatttccccttctattttactttcaaggggataagaaggacgtttagaattataatctttgtaaagaattttatctgaaagcagtgactctctataacgccaatgatatgcagtatgatctctagtatctgtttcatattgtgggttgtaaattaagtcaatatctgccgtcatacctaagtgagaatcgctgtaaaacatccgtggctcaattcctgcatcttcaaaccaaaagcttattccctcttctgcagctaaacggcaaaaaaactgataatctgattcacgcttttgtgttatataatcacgcttaggataagcatcctcagcatagagtttgcaatccgctttaatatgagactcaaataataattgctgaagtaagtcaggcaccgttatttgtcgaaaaattcgactgttttgccctaaagacataacccaaatttcaggtcgaataataaagtgataccacgtttgattaccatctgtattttgttgctccgcactagctaatagcccacgtacagtacgaataggtttaccattgcgcgtaaccgttaaggaacaagcaaaccccaacatatcatcaaaacagatagacggtaatgaacttaccgcagttaaagaaagtgtaaataactcagataaatgctcagtcagttgaaattctgtcacagtgaatgtttcttcaggaattcctttaaattgacaggtaaaaactaatccatccatgactatttctccttgcgaataataagaaaaaatttaacaagtaactctattctttccataagagcagccacattggacaatagagccttctacagcaattttttgtccatccagtatcattccttgctctccagtcactatcgtgccttcttcattgcatactggacaacgtgttgttttatctccaagcctcaatatgctaatcccttcattggtgaccgttaatatgctagcaagacaagtcgctccggtggtcgttttgtcattatgtaatccaatttttttcccaaggactgtggctctcatcattgtttccttacatatatgaagctataaagatcgctacgcagtatcaaaaataacaaattaaactaaacgattacactaaaaacacttcgtccgttatatccgctaccttagccaatgcgtacaataagacttgaataaaggataataaaagcttattaataaactgtaaacagctcccatatttagcatctctctagcataagtcactttgcgtaaaatgattaaaatatcactatatcatgctgtgaaaataatcataaaaagtatttgttagtataaaatatgaataataaataaacaaattactcataacccagtaaatactgggtacagtaaaatatattttgtttccaatatggaaagctcaaaaaatagttcataatgcattgatttttaacagttaaaaattaatcacattcaatttcattaccttgccactttaaatagctcaattttatcaatatatttagctaataagcttggtttaattaaaatataattctaaataagccgtttattttatttagcctatataatatgtctgttttttaatcttcttttgggctttttatattcattttatgaataatgataaaattcggattgcataaataaggagaaacgaaataaataaagattcatattatgttagatatattattttttataaataattaatcaaataagtaatagtagaaaatgacggggaaaatagaaaaagaaaaaatgatatggttaacacccaaaaaatacataagaaaaaccgcttaaagcagtcgttttttaatcaatattaaatgtgatttcatcacattgcgatgggataaaactatgcactattttagtgagtataaccattaacccaaaagccatcatcagatagcttttggattataaataaatgaattatttaatcacaccacatgccattctagcaccaccaccgccaagcgcttctgggttatctgagtagttatctcccccaacgtgaaccattaaggctttatctttaatttgatcaagcttagtcagtctaggagcaagaacggcataatcagcgtcacctttactattggcaaccaaaccaggtagatcacctaaatgcccttctttgttataaggccctaagtgaacacctttattttcaggatcaagatgaccacccgcttttaatgctggaacaggttttccatctttcatatctggctcacaagagccattagcatggatatgaaaaccatgaacacccggtgttaacccagtaagttttggcgtaaataacagcccataatcggtttcggtaatagtgacaacaccaatatcatcacccgcccctgtaggtaaggcttcttttaacgtaacatctaagctcgccgcactggcaaccgatgtaaagagtagtccagagagtaacaaaggtatcagtttcatagtatcttcctcttattatttatgctcagcataaagtcgtcgatatcaacaaatagagactcaccattaatactgtttcaatgtacgttaattagcatatcgtcttaatgcaaaaaaagcgacttatgtcagtaagtcgcttttttatcttaaaatatcaataactatcgatattatttacttttttcaacccatttgccatcaatataaaaggctgaccaacctgttgctttcccctctttttcagaagagacatattgctgtttagttttacgactaaaacgtactatggttggattcccttctggatcggttacaggtgcttgtgctaagtagcgcattttttccgataatctatctttaaaacgtactaactcagccactttcggtgcacgggtttcccttgatttagggaacgtattggccgcaaggaaaatacccgccgcgccatcacgtaacacaaagtaagcatccgatttttcacaaggcaattcaggtagtggaaccggatcttcttttggtggtgcaatttcaccactctttaagatcttacgtgtatttttacactcttcattggtgcaacccatgtacttgccaaaacgccccatttttagatgcatttcagcgccacatttatcacactcaatcactgggccttcataaccttttaagcggaattcaccttcttcaacttcataaccatcacatgcaggattattaccacaaacatgtaatttacgatgagtatcaataagataactgtccattgccgtaccgcatttcggacaacgacgacgggcacgtaatgcattagtttccgcatcatctccttccaagatattaagtaattcatcttcaggaataagatttatcgtttgtttacaacgctcttttggtggtaaagcatagcccgagcaccctaagaatacccctgtcgtcgctgttctaattcccatatgacgagaacaagtaggacattcaatagaagtaataaccatagggttaggtcgcattcctccttcttctggatctttttcagcgacttctagttgctgactaaaatctgtgaagaatgcatctaataccgctttccagttttcttggttgttggcaacatggtcgagatgatcttccatttgagccgtgaaatcgtagttcatcaaatcactaaagttttcttctaagcgatcggtaacaatctcacccattttttctgcatagaaacgacggttttcaactttgacataacctctatcttgaatggtagagataattgaagcataagttgaaggtcgaccaatacctcgtttttctagctctttaactaatgtcgcttcactaaaacgcgctggtggcttagtaaagtgttgcgttggcgataactcagctaacgctaattgcgcccctacatcaaccgctggtaatgttttatcttcatctttactgcgcattgctggcatgacttttgtccaacccgcaaaacgtaatgtgcgacctttagcgcgtagtttataatcccctgatacaaccgtaagtgtggttgagtcatattttgccggtgtcatttgacaggcgacaaattgatcccaaatcagttgatataaacgcttcgcgtcgctatccatatcttttaaagattcagccgtcacattgatatcagaaggacgaatagcttcgtgcgcttcttgtgagttctctttacttgaataaacattcggctctttaggcagatattttgcaccaaatttatcgtgaatataatcacgtgccatttggattgcatcctgactcaggttggtagagtcagtacgcatataggtgatataacctgcttcataaagacgttgagccaacatcatggtctttttcaccccaaagcttaagcgagtacttgccgcttgttgcaatgtagaggtgatcaaaggggcacttggtttactggatgttggtctatcttcacggtttttaacgatgaaagtggcattctgtaacgccttaaccgccacctgagtttcctcagaggagactggtttaaaggcgttatcttgatagtgcgtcacttccatacgcaagggttgttcatcgggtgtcagcagtgaagcgtgtaattgccaatactcttctggcacaaatgctttaatttcacgttcacgctcgacgagtaggcgtaccgcaactgactgtacacgccccgcagataaaccacgcgccacttttttccataacagcggagaaaccatatagccaactacacgatccataaaacgacgtgcttgttgcgcgttaacacggtcaatattcagctcacccggtgtttggaatgcttgtgtaatggcatttttcgtaatttcattaaacacgacacgactaaatctatcatcttcaccgccgatcacttcgcgtaaatgccacgcgatagcttctccttcgcggtcaaggtccgttgcgagatagatatgatctgctttttcagccaatgcttttagttcagcgactaccttctctttacccggcagaatttggtagtttgcatgccaaccattataaggatcgacacccatacggctgactaaggctgatttctcatcctttttaacctttttcacgcctttcgtggcggatgagttttcgctcttctggctgccagaaccactttttggcaaatcacgaatgtgacccacgctagattttactacgtagtcattgccaagatatttattgattgttttggctttagccggggactccacgataacaagagctttacccataattacctttacctaattaaactttgtcatgacggtattgtttaataccctcagctcagaaaacttttgaaatctctttttatattgcgttagttttgcaatatatcaacctgtttttattcaaagcttttgtttaaacgcaaaacacgctactttttttgaggtattttaatcacctcatcactgattcaggtctaaaacatagcgatgtctatgtatatagagtagctaagcttttaaaaatgccacactctacctgataaaaagcgaggcgcaacaaattatttttctaaggagcataaatgatgtcgacacaaactacacctatttccgcagagatgctacttgaaaaagcgaataaaatcatacgtgaacatgaagactatttacaaggtatgtacgcagattctgttgaacaaaaaggcaatgtactggtatttaaaggcgaattttttttagatgagcagggtttacccacggctaaaagtaccgctgcattcaatatgtttaaacatttagcacatgtgttatctgaaaaataccatctagcgtgatgatgtttgctgactattttggcacttattgccaagaaatcggttattaactatcaatataagatatagagaagattttcagagcctatcaattcaatatgtaatatcaattatatttattttctctttatcgctatattgagtcttcctagaaagaggaaatattgcccgattgttgttaaaaattatcaattatttttatgccagtgtgtacctcactggctttttttattcgaaaaacgctgaataaataataaaaaaatagcgatactcagcttacatctaactgctgaatatcgctagtttgatagcaactcgttatttgataatgcttataacagtgggtttttacccctttgtagccaacgcatcattaatttatccacgctttccattgcgccaccagtaactcgttctaccatttttttcttcaggatatattgaacggataatacttcaaaatcattaatacgactaatgagccaatcatcgctgacccccacttcatcaatcagccctttatctacagcatccgttccataccaatactcgccagttgcaacactatcgatatctaattcagggcgatatttatgtacgaaagacttaaatagcagatgagtttcattgagatcttgtttaaatttctcacgaccttcatccgtattttcccctaatagggttagcgtgcgtttatattcaccggcagtatgtaactcaacatcaatgtcatttttctttaataaacgatgaatattgggtatttgagcgaccacaccgatagagccgataatcgcaaaaggtgccgcaacaattttatcagcgacacaggccatcatataacccccactggcggcgactttatcgaccactgcagttaatttgatccctttatcttttaaacgagttaactgggctgctgctaggccataaccgtgaaccataccgccaggactttcaagacgaagcagtacttcatcacccgcttgtgccacagagaggatagcgcttatctcttcacgtaatgcaccaacttcatgggcatccatgctacctttaaaatcaataacatataaacaaggtttaacaacgcctttgcgcccttctttagcattgtttttactcagtttttgctctttcttttgttgttttttaaacgctttatgccacacttttaattcagcctcatccattttggcttgttgcataacacgttgtttatcgtggtaagactcagcaagatcagtcacctttaatgtgccttttcgatgttgctttttactaccgataaccacaaaaaacgaaacaatagcaataatagcgactacaacagtcgcaatctcagctaaaaacagtccatattgtaaaatatactccacaaaggcctcttttaaggttaataaaacacagtgaaatcatagcacctagtttaacgaaattttacgctgatgccagtaacaaaggcgccattctggcagttattatctgtatcactagccgttaatcactttaaaaatgagtcgctaaactggttcttaagcacataagacgttacactttatttatttttcaataaacaggatattaatatgttgcaatatcaacccgatcatactgtattaagagataaaataattctagtaacgggggctggtgatggcataggtaaagaagctgctctcacatatgctcgctatggtgcgacattaatcttgttaggacgtaccttatctaagcttgaagatgtacaaaatgagattatcacttcaggcgggcaacaaccgatgctttaccctttagatctactcaccgcgagcgagaacgattatcaggaatttgctgatactatcgtaaaacgttttcctcatttggacggtgtattacaaaatgccggcctactcggtgtcgttgagccgataattaaccaaccaagtacactttggcatgatgtgatgcaagtcaacgttaatgcaacctttatgttgactaaagccttaatccccctaatgcttaaggcacctcatgcaagccttattttgacaacctccagtgtaggtcgccaaggccgttatggttggggggcttattctgtctctaaatttgccacagaaggcttaatgcaagtgttacatgaagaatataaagacagtagcttgcgtattaactgcatcaatccgggtggaacacgcaccagtatgcgagcaagtgccttccccgatgaaaatgcacaaaaacttaaaacgccaaaagatctaatgccgttatatctctatctaatgagtgatgacagcattgaagtgagtggtcaatctttagatgcacaacccgatcgtaaagccggacctgctgaataacttgagaatataaggtttatcctatgagtgatgcacaacaccaacagcgccaacaacgtttgaaagaaaaagttgatgcccgaattgcgcaggcgcaacgcgaacaaggcattttgatgatttttactggtaatggtaaagggaaaaccaccgctgccatgggaaccgctacacgtgcggttggtcatcataaaaaagtcggtgttgtgcaatttattaaagggacatgggaaaatggagaacgtaatcttttagaacaagccggcgttcccttctatgttatggaaaccggttttacatgggaaactcaagataaagctgccgatacacaagcctgtttaaatacttggcaatatgcactgcaattactcaattcacctgactatgatttagttgtgttagatgaacttacttatatgatcagttttcattatctaccacttgaagatgtggttgcggctattacttctcgtcctgatcatcaaagtgttattattacaggacgaggctgtcatagacaattaatagaattagcagacaccgttacggaaatgcgtcctattaagcatgcgtttgacagtggtatcaaagcacaaaaaggaattgattggtaaaataaacgcgtataataaactcgtattatgtgttcagattgccgtaatatatttatatcaatacaggttcacctaatatacctgcaccaaatattcttccggtctcttttattaattgaaagtaggcttctttatcatccagtatatcattttgtatttgttggctataaatccatgccatagacatgatatgcagatgataaatattataaagctcttgtttcttatcaggatcacgagacgctaaatacgagtaaactatttcataaatagtattggcttcttgtactaattctttattattaaaatttatttcactcagtgtaggattaaaatcctcagtacgtgtatctttttcatttatccaactaaactgttctttcttagcttgtttggttaataaatcgtgattgttatcgaaatgaataccataaggatatttggctaaaaatgtttgaaactcctcttgagagaagcatttagtcaatacattgcctaccccagaattcttccaatctggtaaataaggaggaataggctcatttaatggaatgtcacaacgaaagatattgttgtcgataaacacagcatctgtgctattaatagcaccatgtattaattgtccattgatccaaacagagcgcgtatctaaataaaagtgttctttattttcttctgaagtaaacacggaagtaaagctatagtatatttcctgagagggattaataatccccccattatttccagggtaaaccataaatactttcttttcacctgagtttgattctaatatatgctctccattggttaatgttattttttttacctcacctttattaatcgaaaaatgattagtatcaattttaaattgtaacggcacattgttattgttactgatataaaaaatgcctgtttgtgttgtcgatgttgttgcctcatcacagcctaaactaagaaagttcatacacaacactgttgttaaataaatataacgatgcatattatcgcgtataccttatcgtaataaatacaaataaaatattaatatgatagaaacagcttatcatcgtattaatataagcatcatagttttatttattataaaaataaagctatcaaaaaaagaagtctgctaaaaattagcagacttctgtatctaactgaaaatttaatttgaatttatcaataattattcgtttatttgcttttacttcccgctgattggcggcggcttgaggcacgcttagccggtgaagttgaagtacgcgcagaaattttggtatgacgtttcaccgcccgacgaatttgatttgctttaattcgacgctgatctttttcgacagccactttggttactgtctcatcgtttagttccaccagctggcgtaaatagttaatttgatttaagcctagctcaacccatccgccacgtggaagtcctttaggcaaatcaatatcaccataacgaacacgaataaggcgactaacctgcacacctaccgcttcccacatacgacggacttctcgattgcgtccttccgttagcgatacattgtaccattggttaatgccttcaccaccgcgataagaaaccgaacggaatgatgccggcccatcttctaattgtaccccacgagtcaattgacgaatttttgcatcatcaatttcaccaaaaacacgtaccgcatattcacgctcaacttcacgacttgggtgcattaagcgattggctaactcaccatcagtggtaaagagtaataaaccactggtgttaacatcaagacgaccaacggctatccaacgcgcactatttaaacgcggaagacgttggaatacggtcggtctgccctgtggatcactacgtgtacatagctcaccttctggcttgtaataagctaacactcgacaaacatctttttgtgcttcgcgaatacttaatatacgaccatctaaacggattttggctgtagaattggcatcaatacgatcgcctaattttgccttcacgccatcaatactgatacggccttcttgaagatagccttcaatctcacgtcgagaaccatgaccagaacgagcaagaattttttgtaatttttcagtacgttgcgatttatcgctcatgaaacaacctcatgtgtcgccttcacaggcgtcataaaataaattagtttttaaatcaatcaggtaaaaaataacccatgtttattaaactgtttaacaaacacaggtctattgattcagggataagccatgccaaagtgacaataaaatgagcatgacaaataaaatcgtgtcgataaaatagcacctaaggcttccatcgttactatgccgtttacttcaaaaacagctttcttgatgtcactaaccacaagatgcgcccaatggctttatcgcagtgcgtaaatttaacacaagcaataaatctcttcaccttttatctcactataataagtcccctatgatgcatttaccaaatttaaaaggttattgaaaaggcgtaatatcgcccattccttcacggacaataacggggctatcttctgttaaatcaatcaccgtggttggcttttgccccaagtaaccgccgtggatcactaaatcaacctgtttacccaataagtcattaatctcttccggatctgactctgcaaaatcattacccggtaatattaagctggtagacattaatggctcaccgatattttctaataatgccagcgcaataggattagaaggtacacgtaaaccaattgttttacgtttatcattcattaaacgcttaggtacatctttggtggcttttaaaataaaggtgtagttaccaggcgtattatttttaattaaacggaaaacaacattatcaacataggcataagtggcaatttctgataaatctcgacacattagagtgaaattatgatgtttatcgagttggcgaattcgacaaatacgcgtcatcgcatctttattatccaaacaacaacctatcgcatagcctgaatctgttggataaattaccactccgcctttgcgtaaaacatccgcactttgttcaattaaacgagcctgcggattatcagggtgaatgtaaaaaagttggctcatatatccctcaacgactttttgatgttatccctgccataatgtccatacaggttcaacattagcgggtaaccataaattacgtcctagctctatccacgagcaagggcgatgaaaatcagaacctaacgaagctttaagatcataagcttgtgctaaagctgcgtgttgttctcgctcttgtggtggttgttggcattgtgccacttctatagcatcaccaccttgttgtttaaaataaagcactaatcgctttaaccatttagaggatagaccatagcgaccaggatgtgccaataccgcaactccacccgcttgatgaatagccgtgacagcgtcaccaattgagcaccattgtggcggtacataacctgtttttccttttgctaaatagcgtttaaatactttattgaccgatgccacatgcccttcattaaccaaaaaacgcgcaaagtgtcctcgtgtcacttgcccgcctttcgctagggcacttgccccttcccatgctccagcaatacccgctttagctaaacgttcgccgatcattttagcgcgagtttcacggcattgactctgttttgctaggcatgtcgtcatggcttgatgttcgatatcaatctgtaatccaacaatatggatttctatattctcccacaaagtcgatatctcgacacctgatatcaaagttaaaggtaaacttttttctgcaatataatttttggcaggttggatagcagcagtagtatcgtgatcggttatcgctaataccgtaatttgtttttcaatggctctatcgattaattcatcaggtgagagctcgccatctgatgcagtagtatggctatgcagatcataaatcacgcgtaaatcagatagcaattcagtcattccttctccctgtttatcctcagtgatacaacgaatttttaagagtatgccataaagtacttgacgaacctaatataatccagtttactagtacacaacatgagctagtctattaaatataaacttatcatccgctgtaaggagatcttatgaatatcaatcaacgtcttattgctctgtggtggcgcaaaactcttttatgggcggtttgatctcctgcttagcatcagtgatatctaaaacccgcctaccgcgggtttttttatatgccaattttgtgcttatcagcaccagaaaaaagaaaatagagcgataataatgaacacttcacttgcattcccattaacaactaaggtaacggcattgccttatcacagcgagccggcgttacttttcaatacgttgtgtgaacatcgtcatcacaccttattgttagaatccgcacaaattgataccaaagccaatttaaaaagtttgttaatcgttgatagtgcattacgtattagtgcaaacaaaaatcaagtgactgtcgatgcgttaagtctcaacggccaacatatcttagcgttattaaaaaacgcactaaaagaaaaaagcacactctccgtagagcgagcggaacaatgtgtatttacttttgcatcatcatctttccctcaagatgaagagagcaagttaaaagcggctagcgtatttgatgttttacgttttttcctagcaaatagcgctgcaaaagaagccaatgctatttttgtgggagggttatttgcctatgatttagtgaacggatttgaatccttacctgatttagaagcggttttttcttgccctgactactgtttttatttagctgaacagttaattgtgatcgaccatcaacatcatcatagccaattaatttccgttgcctttacggataatccacaagagtgtcagcgtcttgatacccgtcaggcacaattagttgcactcgcacagcaacctttaaaacaaccacaacgtcaaccattaacacctcagcaagcggttgtaagtagcaatatgaatgacgaagagtatggtgctattgttgaagcgatgaaaacctatattcgtcgtggcgatattttccaagttgttccatcacgtcgttttcaaattaactgcccttcaccactggctgcctatcaagttttgaaacaaaaaaaccccagtccctatttgttttatatgcaagatgcgttatttaccgtttttggtgcgtcacctgaaagtgcgttgaaatatcaagcaagtgatcgccaaattgaaatttatcctatcgcaggtacacgcccaagaggtcgcaatgccgacggctcaatcaatgctgatttagatagccgcattgagcttgaaatgcgcacagataccaaagagttatcagaacaccttatgttggttgatttagcacgcaacgatttagcgcgtatctgccaagctggaagccgttatgtcgccgaattaaccaaagtagatcgctacgcttttgttatgcacttagtatcaagagtggtaggaacattacgtcatgacttagatatttttcatgcctatcaagcctgtatgaatatggggacactctcaggagcaccgaaggtcagtgctatgcaactgattgcacaatatgaaaaaaccaaacgaggcagttatggcggtgcaattggctactttactggtaacggtgattttgatacttgcatagttattcgttctgcttatgtagaaaaagatattgcaactattcaagtgggcgctggtattgtgctcgattctgatcccaaaatggaggcagaagaaactcgcaataaatcacaagcggttatcaatgccattttacaggcgcatgctgaaacgcatatgcaggaggcttgctaatggcgacgctcttactactcgataatatcgactcttttacttataacttagtcgaccttttacgcagtcaacatcatcaagtgatcatctatcgcaatgatgtcagtgcttcttttatcgaaaaacaattaaacctgttagataaccctattcttatgttgtctcccggccctggtacaccatcacaagcgggttgtatgcctgagctacttaatcgcatgttaggtaaattgcctattattggtatctgtttagggcatcaagccattattgaagcttatggcggtaaagtctcttcttgtggggaaattttacacggtaaagctacgctcgccacccatgatgggcaggcgatgtttgaacatctgccaaatcctctgcccgtcgctcgttatcattcactctctggcgaaattgtacctgagcaacttatcgtcaatgcgtggtgtgataacaccgtgatggccgtgcgccatcgccaacatcgaacttgtggttttcagtttcatccagaatcaattttaaccactaaaggcgcacaacttttacaacaaaccattgcatgggcacaagcaccaagaggagacgcataatatggatactatcttcaataaattatttgcaggacaacaattaagcttagaagagagccaaacactgtttagtgcgattattcgtggtgaattaacagaatcacagttagcagcggtattgattagtatgaaaatgcgtggtgagcaccctcaagagattgccggagcggctcgtgccctattggataatgcatctccttttccacgcccagattatctgttttgcgatattgtgggtactggcggcgatggagccaatagcatcaatatttcaacagccagtgcgtttgtcgcggcagaaattggtctaaaagtggctaaacatggtaatcgtagcgtgtctagtcgctcaggatcatcagatttattagcggcatttggtattccgctagataaaagtgccaacgatgcccgccaattgttagatgaaattggactatgctttttatttgcgccgctttatcacagtggttttcgctttgccgcccctgtgcgccaacagctaagaacacgcacgctctttaatgtgttaggcccattaattaatccagcgcgtccgcctttagcattaattggtgtttatagtcctgaattattaatgcctattgcagataccttaaatgtcttgggctacaaacgtgcggcagtggtccatagtggtggaatggatgaagtgtcattacatgctcccacacaagtggctgaattacacaatggggaaatcactcgttatcaattaaccccaagtgattttggtctgcgtccttgtgcgataagtgatcttgaaggcggtacacctgaggttaatcgccaattattggctaatttactgcaaggacaaggtaaacgcgcacacactgaatccgtcgctgccaatgtcgccttattaatgcgtttacacggacaagaagatttgaaagctaataccgaagttgctatgcacgcaatctatagcggtaaaaccattaatcgagttaatgcgctagccgcaagaggataaaaataatgactgtattaaatgccattgttaaagataaagccgaatatttagttgcacgtaaagcacagcaacctttatcaacctttatagataagattgcgccatcgacacgctcattttatcaagcattaacgcaatcacacccagtgtttattttagagtgtaaaaaagcatcgccctcaaaagggattattcgctctgattttgatcccgttgccattgcgaaaatttatcaaccctatgcagccgctatttcggtactgactgatgaaaaatattttcaaggcagttttgattatttacgtcaagtgagtgatgccgttcatcaacctgttttatgtaaagattttattatcgatgaataccaaatttatttagctcgtttttaccaagctgatgccattttattaatgctttctgttcttaatgatgaacagtaccgtgcgcttagtgccgttgctcaccaattaaacatgggagtattaacagaagtgagcaccgaagaagagcgtcagcgagccattgagcttaaagcaaaagtgatcgggattaataatcgtaatttacgtgatctctctattgatttatcccgtaccgaacaacttagccaaggtttaccgcaagaggctattgttatcagcgaatctggaattcatacccatcaacaagttaaaacactaagtcaatatgctaatggctttttagtgggtagtgccttgatgtcacaagagaatattgcccaagcggtaagagcacttattttgggaaagcataaagtgtgcggcttaacccgtacacaagatgttaaagcggcctatcaagcgggtgcctattatggaggattaatttttgctgagaaatcaccacgaagagtgacactgtcacaagcacaattattggtaacacaagcgccattagcttttgtgggcgtttttcaaaaccaatctattgagcttatttgtgactatgctaaacaacttaatttatctgcggttcagttacatggcgctgaagatgcacaatttatagcccaactaagggaaaaaatcgccccacaatgtgaaatttggcaagcgcttaatatggcttatcaccatgatattcagcacattgcgcaagttaacaaatatgtattagataatggtacaggtggcacaggcaacacctttgattggcaaactattccgcctactttacgccataaagcattacttgcaggtggcctaaacagtgataactgtttagatgctctaaacaccggttgcttaggacttgattttaattcaggggtggaatcttcagcaggtatcaaagatccacaacgtctatcgcaagtctttacacaattacaacaaagcaaattttcacaaaatttctgacaaggacaacatcacaatgagaaaacttaatccctactttggtgagtttggtggtcaatatgtaccagaaatattgatccctgcattagatcaacttgaacaagcctttattgacgcacaaaacgatccgtcatttcagcaagagtttcaagatctactcaaaaattatgcaggtagaccaacggcactgacactctgtcgcaatttgacccaaggtactcgtacccgtttatatctaaaacgtgaagatttattgcatggcggtgctcataaaacaaaccaagtattaggccaagcactgctagcaaaacggatgggaaaaacagaaattattgcagaaacgggcgctgggcaacatggtgttgccactgcgttagcttgtgccctgttaaatatgaagtgccgtatttatatgggggcaaaagatgttgaacgtcaatcacccaatgtatttcgtatgcgtttaatgggtgccgaagttattccggtgcatagtggttcatcaacattaaaagatgcgtgtaatgaagcgttacgtgactggtctggttgctacgagcgtgctcactacttattaggcactgcggcaggcccgcatccttatcccactattgttcgcgaattccagcgcatgattggggatgaagctaaagcgcaaattttagcccgtgaaggtcgtctccctgatgccgttatcgcctgtattggcggtggctctaacgccattggcttattcgcctcatttataccagaaacctcagtacaattaattggtgttgagccggcaggaaaagggatcgaaacaggagagcacggagcaccattaaaacatggcaagttaggcatttatttcggtatgaaatcaccgattatgcaaaccgaagaaggccaaattgaagagtcctattctatttctgcaggattagatttcccatccgtaggcccgcaacatgcgcatttaaacagcattggccgtgcagattatgtttctgtaacagatgatgaagccattgaggcttttaaaacgctatcacgccgtgaagggatcatccccgcattagaatcgtcacatgctctggcctatgcgttgaaactgattgcccaaaatccagataaagaacaactcttaattgtcaatttatccggacgaggtgacaaagatatttttactgttaacgatattttagctgcacgaggagaaatttaatgagccgttatcaattatgctttgaagcattagcacaaaaacaacaaggcgcgtttgttccctttgtcactttaggtgatcccgatgctgaactgtcgttaaaaattattgacgcattaattgaagggggtgcagatgcgttagagataggcattccattttctgatccactggctgatggccctactattcaaggggcaaacttacgggcattaaatgctaatgtcaccccaaccctctgttttgagttattaagccagatccgccaaaaacaccccactattccgattggactattggtgtatgcaaatcttgtttttagcaatggcgttgataatttttaccataaatgccaacaagcgggtgttgattcagtactgattggtgatgttcccttgcgtgaagcaaaacaatttcgagaagcggcattaagcgcgaatattgccccgatttttatttgcccgcccaatgcagatgatgagttattacaagagttagccaccagcgcagagggatatacttatctattatcaagagccggtgttacggggacagataaacgagcagaacagtcactcactcatttaaccagtaaacttaaagcttataatgcaccacctgcattacaaggttttggtatttctgagccacaacaagtttcacaggccattagtaatggtgcatttggcgctatctcaggatcagccgttgtacaaattattgaaaataacctacatcaacctgatgtgatgttaaaaatgttgacgcagtttgtgcaacaaatgaaagccgcaacaataagcgtttaagtctaaaattattatcgccgtctgcttagagaaaactttttcctaagcagatttttcctaatttaatcattaacaatcgaccatcacttccccatcagcctctattcatagcgcgagtaatgcttgattcgcctaaacaagcataaaactatttttgctcagtcagttggcaatctgtcatttcttgcacatactttatatagggtatacagctttaggttttctattcagtagtactcaatcaataatgtcattataaggagtttgataatgaaactatgggcaaaaatttctaccgtattagcggcattacttatggccatgactttatctgcatgctctccaacggcaacatcagaaggcactgggggatattttgatgactcggtgatcaccactaaagtaaaaacagctttaattggtgagaaaaacctaaactcaacacaaattagcgttgagacatttaaaggtaaagttcagttaagtggttttgtctcttcacaggctgatgcaaatcgcgccatagaaaccgcacgtaaagtcactggcgttaaaggtgtcattaactcaatggttatccgttaagctattttttataagtcagtaagaaaaaagccacttcggtggtttttttcttgtctcatctaaagcattccacactctttggtatgaagatcaatttttgacaaattctctgttttactaaaattagccgtttcttttttacgggtaaaataccccaaaaaaaaccgttaaaactaaagttatacttatcttttttcgatgttattttcaccacactggtgactttcacttaaatttgatgcgaccatcattttcttaatagtactattcaatatcagtaataatattttggccgatttaggcgctattttttaattattattaggcaatatcatgggcatataaaacatgcaaataaaatacatctataaattcccatttatgcaagacaattaaatgctcatcgagaatagtgattatttttttaactaataaaaaatataaagatgtatttttaatgcactattaaaatatacctctattattttagttataatcagctaagccttaatacacataatagaggtaataaaattttttagtctaaacacgatcactgtagataagcaattatgattaacacagataaaaaaaaagcggagccactgccccgctgatacttaatagcatattctgttattgcaagaataattagaaacgataaccaacaccgaacataaacacaaatgggtctaagcgagtatccactttatagtggtttccatcgccatctttaaatttgacatcggtttcgatattcatccaccaaacagaagcgttcagcatccagtttttatctaggttatagtctaaacctgcttgtgctgcgaagccccaagagtttttaagatcaagatcatttaatccaagtttgcctaccgctggattattattgaatttttcatcaaagaaggtcgtaaagtttagaccagcacctaaataagggcgtaatttatcttcagcaccaccaaagtaatactgtgccattaatgttggtggtaaatgtttaactttagcaatttcgcccacaccagttaaagaaactttatgctcaaaaggtgttgctgctaataactcaaccccaatattatcagttaccatataaccaaaggttaaacctaattgagtgttgttattagcatcaaaatgcccacctaatatagtatctgaacctgtattaggacgaactgttgcagtacccgcacggaataaaaaatcacccgcttgatgagcaaaagaaatagacggtgcaagtgttgcagccgctagaataagcgcagaaagttttttcattatttaacccattcctgtaataagtaaaatctccgctaaaatatacccattaataagtaattatgatctaatgccgatcacaactttggaattatttttgcagaaagtgttattcctctctttattatttatgatgctgattatttataattgatccacatcaaatttagcattaatacaatattttcttataattaaatttattgtttttaagaatcattaaataaaagaacctcattaaaagatgatatttgacaacatcgttatttaattgttaatttaatgtttcatctgatttgattatttaattttcattcaccaaacgaatgaaaaaaacctttcaataacaatagctatagaaataacagaaatgatccctttttgttgtcttaaaaggtacaatatgtcccattgacttagtctatttgtataggagcagtttcatgcctaccccggcacgcacaatctaccgtgatagtcttaacttttataaaaatgaacaacgtagcattatcacgctatctgcagttttggccctcattttagctgtcatatatctattggttggccctaatgcacaagaatcacaaataattaatgactttattattaattttcaaaaaaccagattcgctgatgtctcacccgctgaattagaagcgatgaataacagtgttattggggtatttcaaaaggtcttactggtctatgtttttgagctttttcagcaaagtattctggttttagtgattttaatgttggcaatggcactttctgccggtcataacgtgacattgaaccaaacgtttaatgccagcttaccccgtttaccgaagatgtttctgctaattttgctctgctctattttaattagtgcaggctttatgttgattatccctggtatcattttattagtgggatttgcactagcgccagtcgtactggtacgccaacaatctattggtagcgcaatacgtctaggctggaaaatgggctttggtgaatcaggggcgctgatccctgccttaggaatttggattttattacaatttgggattggcttcttaagcaatattacgggtgaattgcctaacatgatccacaaatttttatattattttttaaagaatattacgtctgcatggatgattatttatctattccgtctgtttatgctgactgaaaataaatatatcaccaagtaaccccctcgcagcaaacaatgccgcgctaatgtgattaatagattagcacggcattgttattaacataatcatttaaaaataatcaattaaccttacacacctatccagccactaaaccccatgttattcattctatcccctcgtttccgtatccctgatgaaagtggcttggttatcttcagcaaacggcacttgttgttgctgtttgtgtttttcttttatttgttgtcgactttgatataaacgaataacaaaatagagatcgggggcaataattaaatcatcatcattgatagtgatcttgttacgtgcaatccaacgatttaattctgttctgcgcccagccaataccaatttaacgcctttgatcctaagctctctaattagctcatcaataacagcaaaaacactcacatcgtcataagtaaaacttacggtagcatcaaccgctaaccatgcaggacgttgtggcgcgctgtccactagctgtagtacccgctttttaaaatagccaacattgaaataggttaagggggaattaaaacgatacatcatcaatcctgatatcgattcaatgccgttaccttggttgattgagtggatcattccttgttcatcaacacctaataactgatcacttgggcggaatacaatacgtaaaaattgcaataacccaagtaacacagcaaaaccaatgccgttaatcaatcccgctaacaacaccgctaataaagtaaacgttgctaaggtaaaagcttgtcgatttcgtttacgataagaccaaatatgacgaatacttagcaatgaccaagaggaaacaatcagcacaacgcctaaagaagataacggaatgtaggcaataaagtcggtcataaaaagcaacacaactaaaatgactaacgcagccacaatagagaccaattgtgttttaccgccaacagaatcattcaccgcagtacggctactggcggcacttactgcaaatccttgcgaaagtgccgatgcgatattagcaatgcctaatgcctttaattcttggtcggcatcaacatcataaccatttttgctagcaaaacttcttgccgtcatcataaagctaacaaaactaatcaccgcaaggttaatggaaggaacaattaattcacgaagtgatccaagatgaaagccactcattgaaacgatgggtaaaaagagatcaccgttgtctgcttctttatcaacaatagcaatcccataattgactaaatcaaattgccaacttaaataggtcatcaccaccatagcaattaacggagcgggccaacgttgtctaaaatgacgaatacataatagtaatgctaaggttagcgccgacatcaacagtgttggccaatgtgcttcttttaatcgaaaaggtacttcaagtaatttttcaattaaatattctggggaggtggtaaaaccaaatactttactcaattgccccaccatgatagtgatggcaacgccatttaatagaccttgtaatataggtctagagagaaagtccgtaaatgcgccaaagcgaaaatgactcgcaagaatgcaccaaaaaccggtcattgcagtcattataatggccagttgccaacgggtattttcatcccccgcagaaagagggatgacaactgcggctatcacggcacaagttgcagcatcagggccagtaattaattggcgtgaagtgccaaataaagcatacatgatcatgggtaagatacaggcgtataatcccacaatggcattgataccgagtaattcggtataagcgatagcaacaggcaatgcaaccgcagcaacagaaagccctgctttaatatcatatccaagatattcacgctgataattaaacaataagcctaatccaggcatccattttattattctttttccgttcattgatttcctcttatctgaattactttttcgcgcattcatcaaaaagtcgcgtgaagagataatggctcaatgaatcatatactagagtgatgttttaatctcctaccataatcaatactttatctttaaatgacgcaagattaaattaaaccttatattcaatgagttaatctaatataaaaccgccatattgtgataaataagcctgatcttattaaagatatgcaattgtttacccttttcatgtcgctttgcattagaataacctagtttataaatttaacgacaataggtttctatcggttatgaaaaacggctggcttaagcaattacttgatttcgctccactattagtgttttttatcttttataaatggcaagatattttctatgcttctggcgcattaattgtagcaacatggatctcagtcggtttaacatggcttattttccataaagtcgaaaaagcaccactgatcaccgcaatcgttgtaacgatatttggtacattgactatcgctttccattcagatgtctttattaaatggaaagtcaccgcaatctacgccatttttgcgctagtgcttattgcgatgcaactctttacgccgaaaacattaatggaaagaatgctaggtaaagaattagcgatgccagcgactaattggaaaaaactcaatatcgcttgggtactgttctttttagcttgtgcgctgggtaatctttatgtcgcattttctttatctcaagaaacttgggtaaactttaaagtctttgggttaacaatattaaccttaatctttactgtgattagtgttgtgtatatctggaacaaccggttacccgaagaagagacgaaagaggaatcaacagaaagtcatacatctgaaacatcagataacggaacaacatcaacatctaaagtattacataaagatgtgacatctaaatctgaataatgacctctattttatcgggagactgcctcaagggagtctccttagttttaacattgatagatagtatttccccatgactgaacaacaatctttgcctaatggtgagctagtattacgtacgcttgccatgccagctgatactaacgccaatggtgatattttcggtggctggataatgtctcaaatggacattggtggtgccattttagcgaaagaaattgccttaggtcgcgttgttactgtaagtgtaacaggcattacctttctaaaacctgttgccgttggcgacgtcgtttgctgttatgctcgttgtttaaaaaccggtaactcttcaattactgttaatattgaagtgtgggttaaaaaagtagcaaccgagccggtaggtcaacggtatcgtgccactgaagccgtgtttacttatgtggcagtcgatgagaataatagtgctcgtcgcctacctgaaggtaaaacaaattttaccttagcaagtaccatggaataacctttttaagctcaataaaaccaacaaaaaaggcacttatcaaaagtgccttttttatcattgagtgatgtgaagctttatcaatcaatggcttcttattaacttgcagaaacaccatctatattaaaatcaatgataaccactttacctttataagggattttctcataacgccattgacgcattgcttttctcacttcgcgttcaaagacatttttggggttagcagagagaatttctacattatctacccgtccatcggcatcgatatcaaagcgtacttttattgacccctcaatacccacagccttggcacgaggaggatagataggtaacccttggcgaagcacattaggtacttttccttccccttggctagttgtcgcaacaggcttttcctcacctttattactcggtgtagcgttgggattaagatttttcatctcatttcccttgttcagcgccaatggctgttgctgtggccgttcgacaggtggctttggtttttccaccggttttggcttaggttttggtttcggttcgggcttcttctctatcggtttttcaatcaccggttttacatctgggatcggttctggttctggctcaggttctggctcgacaacaggctcaggctccggaggcgtcacctcttcaactacaggctcaggctctcctactggctcatctgcagcaaaggctagcatctgtatagagataggttctggtgcaattggcttatcttctacaacatacagtatggcagccgcaacaagcgaggcatgcaaacacagtgatataaatacccaaagcttaaagcgcataactgatcttatttcacctaaacaaaaaataatgcctctagtttaaatgcaaatagcaatcatattcaataacgtttatcaaaatgattgctataacaactaaaaaagctaaagatcaatttagttcggtgtattgcacgaacaacagcgctctatgttttctagaagtatcaagcttacgcatttggtaaatacgtaagttacggcgtgattgaccctctaaccaacggcgacggcgacgtaacgcttgtctcatcattcgccaacgtgccacttcattcctgctatgtctcattgcaatcaatacctattttttcaaataagtggtgtattataggacgttcattttatgatccaaggggggattgataatttgccttattttttatttatgctttatacctttctctcaaaaataaaatgtatcaaaataagtatatagcgacttatttgatgtttatctcttaccagagagatttgacagagaaaataatcctgatttaataacaacatttggcaaataatagaaataatgaactattgttagtaaattgcctccgacctattcatgcgattctttttcaacggaaaatagctttactatgacaacattttatactgtattaagttggctaacttttttcttctattggctattgatcgcaggggtcacatttcgtgtcctaatgcatcgacgacctgtcacctcaacgatgacatggctactgattatttatatccttcctttagtcggtgttatcgcctattttgcctttggtgaacttcatcttggtaaacgccgtgtcgaacatgctaggcagatgtggccttccgtagttgcatggcttgaagaattaaaaaaatgtaaacatattttcgctaaacactatagtgatgttgcggagcccatttttcagttaaccgctaaacgccaaggtattaatggtgtaaaaggtaataagatccagctactaacaacttgcgaagactcattaaatgccatcacgcgtgatattaataatgcgcgcgataatattgaaatggtgttttatatctggcaatccggaggattggtagaggaagtcactgaagcccttattcaagcggctaaacgtggtgtaaaatgtcgcattatggtggattctgcaggaagccgtagtttctttcgcaccaatggccctgcaagaatgcgagccgccggcattgaatttgtcgagtcattacaagtcaatctgttccgtttcttcttgcgtcgtatggacttacgtcagcatcgtaaaatagtattaattgataactacatttcctataccggcagtatgaatatggtcgacccacgctattttaaacaagatgcgggtgtcggtcagtggattgatattatggtcagaatggaaggccctgtttctacgacactgggtattatttatgccttcgactgggaaatggaaaccggtgaacgccacttaccaccgccaccagataacaatattatgccatttgaacaagcaaatgggcatactacacaggtgattgcctcaggtcccggctttcctgaagaactcattcaacaatcattaattacggccatctattcagccagaaaagaattagtcatgacaaccccctacttcgtgccaagtgacgatctggctcatgccatttcaactgccgctatgcgtggtgttgatgtcagtattattgtgccacgaagtaatgactctttcctggtacgttgggcaagccgagccttttttactgaaatacttgaggcgggtgtaaaagtttttcaatttgaagatggcctattacatacaaaaagtgtaatggttgatggtcaactgagtatggttggctcggttaaccttgatatgcgtagtttatggcttaattttgaaataactgttgtgattgatgatgaatgttttgctagtgatcttagcatcgtacaatatgattatattgcacgttcaacacaacttactcttgatgaatgggaaaaacgtccatttatgaatcgggtgttagaacgcctttgttatttctttagcccacttctctagaaagagtgatacaatcagctcagtaattatatcaacaataaaatagttagcgaaaacagctaactatcgatataaatagcgcgacaatattgacataatttataggcatgaccatgaaccaaccaaccttaatcagtgaagaagaagctttagaacaagcctatgatctctttttagcgcaagccgctgataatcttgatgtagccgatcagctgctttttaatttacaatttgaagaacgaggtgcggctgaagttgttacattagggaatgattggcaatttattgtcggtttacctgtttcatcagcccggtttagtgaagtgattatcggtcttgcaccggatgaaaacgccgatattgatgatatttttggtcgtgtattaattagtcgtgatcccctgcaacccatgtaccatattatttggaaatcttaacttcttaataaccacacaatttgtctgtttaactacactggcgaacttatcaattttaatttgtttaaaagtagcttatataaagactaaaaaggtcgcaaaagcgaccttaaaaaatatattgactatcgtgtgtgacacctttgattaaaaacgataaccgatacccactacccaagtagtaaaatcaatatcatatagtttggagtattcataagaaacatcaatagctaagttagtgattgggtttacttgtacacctaatccataagccattgatatcttattttctttttctctttcatcatagtagtgaaagtcttcatgaaaatagccaaaacctattaatccatatgcactgacataattgttaaggcggtaacttggacctgccgttaacgaatagtagctaatctttgaagtacctgcatatccccaatgatcataaccatcatttttattttttgcatatgaaaacgaactgataacgccccaatcattagctacttcatgattatattttaagttaatacctttaaggttatcatttattaaatcttcatcgactttcaatttagatttagcataccctatcgacactgtattttctaatgttgcataagcattaaaagaaagagtagaaacaacgagtattgaagttgaaagcaaaaaattaaatttcatttttattctctatataaaataacaaaaaaactaaaaaaattatattttttatgaagttaagcatctttaaacaataaaaacgatacaataaaaaacatttattataaagaaattcttattaataaaatgaaaataaaatctctctatttaattagagtaaacttatattatttttatccaccattaagtaaatattaagaattgttattgtttttgattattctaaattaaccaaaatataaaaataaaaaatcatacgcttatataaaatatatattattaaatctattattttatgctatctttatagcataatttatcttatgttatttttttattagttgagttatcaatgttaaaattaaataaaattcatcatgtggcgattatttgttctgattataagatcagcaaacatttttattgtcaaatactggggcttagcctattaaatgaaaaataccgtgaagaaatacaatcttggaaagcagagcttgcgttaggtacagtctaccaaattgaattatttagcttcccagatgcgccagcacgcttaagttacccagaagctcgtggtctacgccatgtggcatttgcagtggacgatcttgatgcttcagttgcttatttacaacaaaacaatattcaatgcgagccaatacgtctagatcctagtagccaaaaacgttttaccttttttcaagatcccgatggcttacctttagagctttattcaatatagttcacaacatataacaaggccgcaataaataatgcggcccaaattaatatattatttattaatacgttaaaatatagacataaaatgattaatctatatttttatcaaatacactattgactaaagtgatttttgactctgcttttgtatattgtttaatcatcggaatgatgcgacgaaaatgttcactattacaatgaatatctagtgcttctttatttggccatgattcaataaaaataaagtgaccgggatctttctcatcaacaaataaatcatagctaatacaaagtgcttcttgttggctagctttcaccaattcttggtaaagtggtaagaccgtttctattgatcctgatttaataaaatcttctgcaataacctttatcataaatatcccttactattaatatagaatggtgatgagctactatttactattatagaggttatattatgattaaaaataatagaaaaattcaaacataataccgcccaaaccaatagggtttaatggcccaaaaagaccaataggtagaaaagtggttgccatgatctatttccttagttttatatgcaagtgtatacgttgctattatttttgataaaaatagataaatcaataagataaactctactttttaagataatatttaccctattcacttttgttctgtatcacgatgctcttcccccctattttctactaaaaaacaacttactttctgtataaaaatcattatttacgaataattatgctaaaagtgtataaaaataggcgtttaaatttttctgtttctctttatataataacaggtcaaagtttatatcatgtacagtaaaagtatgggggttactgtgtggcttgaacaatttggagtgctcaatatttggacatatcttgcgggtatgttctttattattatcgtccccggccctaattccctttatgtgcttaaaaccagtgcatcaagaggagttggtgcaggttatcgagccgcattaggggtttttattggcgatgctatcttaattttcttagcatttatcggtgtggcatcagttattaaagcctctcctgtgctttttactattgtccgtttcttaggtgctttttatctactctatctcggtatcaaaattattcatgctaacttctttgccaaaaagcaaagccatactgagacaaactgtattcaagaacatgtatttcgtaaggcattaacattaagcttaaccaaccccaaagcgattttgttttatatctccttttttgtgcaatttatcgactttaactatgcacatactggtttatcctacttgatcttagcttctatgcttgaagcatttagctttgtttatctctcttttcttatttttggtggtgtagcattggcgcgtttcttcggttcacgtaaaaatatcgctaaactgggaaatggtattgttgggctattttttatggggtttgccaccaaacttgccacactctcctcttaaatagacgtcctttagtgacttaaataagaggctgttgttatcaatagcgattatctttgtagtaatcgctatttttcccccattactatcttgatcagtaagtcagccccacagggtggcgattattttacttagcagtttcgaaatgcgctatgcttctgttatcattgtccgcttatcatttccttgcaataagtggtgattaaattttgctttttagctttattcgtttaaacgcatagatattatgttattccgataaagcacctcacgcaacaaattgaaaataaagcagaaaacctctttaaagtaagttaaaaaaccttagcaacgatatagaaccgtaaaaaatgagcatcccaaaagagcaatataattttaacaaattacaaaaacgcttacgccgtaacgttgggcaagctatcgctgattttaatatgattgaagatggcgataaaatcatggtgtgcctttctggcgggaaagatagctatactctcctatctatcttaatgaatttgcaaaaaagcgcgccaatacaattttccttaattgccgttaatttagatcaaaaacaaccgggcttccctgaacatattttacctgaatatcttgagcaactgggtgtagagtataaaattgttgaagagaatacttacggtattgtaaaagagatcattccagaaggtaaaaccacctgttcactttgctctcgcttacgtcgtggtattttataccgtacagccaccgaagttggggcaacaaaaattgctttaggtcaccatcgtgatgatattttagaaacgctgtttctgaacatgttttatggtggaaagctaaagggcatgccacctaaattaatgagtgatgacggaaaacatatcgttattcgtccattggcttatgcccgagaaaaagacattgaacgttttgctcaagcaaaaaatttccctattattccctgtaatctttgtggctctcaacctaacttacagcgccaagtgatcaaagagatgctaagagattgggataaacgttaccctgggcgcattgaaaccatgtttagggcaacccaaaatattgttccgtcgcatctatgtgatacccaattatttgactttgctaatatcaaacagggtgatgagattattaacggcggtgatctagcatttgataaggatgatattccaacaagccctattctttccgatgatgaagatgagcgtcctgattttagccaagctagattggatgttgttgaggtaaaataagcatagccagtattatccctagcaaaccatcgtcgttgcgctggggtttaatatgctttacttatgacgaaaataataagcaaaaaaaaaccgatgtttatttaacatcggtgtaataatggtcaattattctgtattaagaactcaatatgagaaaaactacaattatggagcacaacgttcatcgctcaacgttgtattcacctgcgagagttataatgccagatgttggcatttaaaaaattgatatatctcaaacagagttagagaattcttttttaaatccatttagttacgattaatttgctgaaatttcacaaccacctactacgctttaaccaccaagcaacaatcacaatcaagaaaaacagtgaaaagcaaaatatagcaaagccataaggaaattcattaccggggatcccccctaaattaaccccaaatagtcctgtcaaaaaggtcgtgggcaaaaatagcatcgccattaatgacatggtatatgttcgcctgttcatcgcatctgccatcattgaagtaatttcatcagcaataacggctgtacgagaaatactactatctaaatcttctaatcgacgcgagagacgttctgatatttcaaccaagctaatgcgatcactgtcgctcatccaaggtaatttttcgatagagagtcgggagaatacatcacgttgtggcgccatataacgacgtaacacaatcagttgcttacgtagcaatgccaattcacctcgagccggaatttgctgatcgaggatcatatcttccaactcaattaattggtcatgaagtgtttcaacaaaatcacctatttcatctgtcactgcatcggccatagtgatcaaccaactaccactattttctggaccatcacccacttctaaagagtggatcaccgaatcaacggaattaacgcgacgatgtcggctcgaaataatcatttgaccattaatataaatacgatacgcaatcagttcatccggccgatcatcggggttgttattaatcgtttgcaaattaataataaccccttccccgatacgctgtgccttaggtcgaacattttcagctaaaagcacatcttttgcgataggaggaagtaactcagtctgattaatccactgatcacttttgggtttacgataatcgagatgaacccaaaaaggcctttcattacttgctatgctattagccgtgatcggcataattccgccatgcccattaagctgagccatatagatagcatcagaatcttcgattatagcgttattgacacttttcattattcgtcctccttgataccatcatttaaaatataattttatgcttttttctaaaatcatgtaaacaatcaataatattgcctttatttgattatgttgcaagaggttaaatcaagccactatttagcctagattaacgccatcacatccttccatctacaacaacattattgagtaaaatattttctactttaagatttttacactaaaataagcattaattattaggttatgatagatttttcaatatatgcctatatttaggttatcgattagcactagatattagtcataaaaatgaaatttacttaaaataaacgcaaatatttaattaatttgtcgcccctgaaataaggctactaatatgaaaaagtttctcaccattcctttatttttacttttagcaggatgcaatacagcgacaggaaccaacacccaagttatgaacgattcgacaaaaacactacttattgactctcagctttatgattgtgttggtgttgcgccaatgaaatgcatgaaagtaaaagaattacctgctggtgaatggtctctcttctatcaaaatatcgaaggatttgattaccaagcgggaacgcagtacaaagtaaaagtcaaagttacagatattcctaatcctcctgcggatgcaccaagcatcaaatatacactggttgagatcttagataaaaagtaagtaactcactagctaaacaatggattttcggatccattgtttatttcgctattattacgctttcctttagctataaattataaataagatccaataataataacgattatttataaaatatcttatattatctaaaattatagtaattacccttctattaataccaaaataatttcttttaactcaataagaatgctagttttttttaagaatcattccaaagaaattaacttgaaatatgttattaactcactaaaaatatcgccatctccaacaaattagatacgcgataatgaaaaaaaatcttattttatttataagctttattttacctttctctccatcactacatgcttttgagaataatcaggcaatttatggcggttacatatatggaaaaataaaaaaccacaaagcaaatggtgcaataataagttatcactatggatccgatattcactggggaatgttactttcattactgcatatcaagtcaacacatcaaagccattttatagacgctagctcacttaagctaggcacaaaagatgaacatgcaaaggtttctgcattattaataggcccaacgtatcgaattacaccttctttggctatctacgcccaaatggggcctaaaaaattaaaatatcgagttgataaaagttattcaggcgttgcggtaaccgataccattatcgtcgacaccaccaatgtgatgtttcaagcgggtattgattatagccttagaaaaaatgtaggcattaatcttggctatttacattcagatactgagtcaaacaaacataatattagactaaatagtatccaattatccttaggctatcgtttttaatgttttataaatatgcgataacataagttaaaaataatcttatcaattttatttgttgttaaaatacgtttactgaccactgaaattataattataaagctatattaagtagttatacctataaataaaaagtataaatttatactttgcatcaactgcacgattagtcaaaacattcatgcaaaattatattaacataattttgcaatgtttattccttttgagtctccttctgtttcataacagagggattttttttctctatctctcttcccctaaaaaaaagtacgcaataatcattacgtactctttgctaatattttggctttcttatcttattgcctgtaacacttatttaatgctttataacatacagcatatggctataagcgacatcttcaggattctcaatgggataaccttttagccaaggtttgattagacgaccattagtatactgatagataggggcaataggcgcctcttccgcaataacctgttctgcacgattatagagacgatttctttcctcttcatctgtcgtcatattggcttggactaaaatctcatcatattgctggctctgatattttgggatatttccagcatgcttagaacctaataaagataaaaatgtggagggttcattgtaatcgcctatccatgacgctcttatcacatcaaaatcacctgaattacgactatcaatataagttttccactcttgattgcgtaagtttacctttacgcctaactttttcttccacatagaagcgacagcaatggcgatcttttgatgattttctgaattattataaagcagagagagagttaaaggattatgaggaccatagccggctgctgataacaatatttttgcttggctatctaattcatcctgactgtattcatcatatagtgttggctcaggcgtaaaattagccgtcacatcaggagtaaagcgattcgctgatttttctccagtaccaaggactttgtcagtaataatttttctatcaattgccatagctaacgctttgcgaacccgaatatctttggtaggccctgcttgtgtattaaatgcataatagtaagtacctaactgctcagggatatacacttgatcaggaatatctttcatcaatttgtgatataagtgtttaggaaaagactctgtaatatcaatatccccagctaaataacgtttagtcgcttgtgattcatgattaataggcacaaaagtgactttggttaacaccgtattgtggtgatcccaatagtaagggtttggcgttaacacaattttctcattcacaacgcgatcttttagtataaaagccccattgccgactaaattacctactttgatccattctgaaccgtatttttcgattgtgtgtttaggtacaggataaagtgaaaaattggtcgctaaactagggaaataaggaacaggtcgttctaaggtaacttttaacgttttttcatcaatggcttccacacctaacgcggttggttttaatttaccatcaataattttttgggcattctcaatagaagctagggatgcataccaagcaaaaggagaaagattttttggatcaactaatctttgccaactataaacaaagtcagaagccgtcaccttttcgccatttgaccatttagcattatcacgtaatgtaaaaatccaaacccggttgtcttctgttcgccatgattgtgccactccaggaatgggacgccctcgctcatcttctatcactaatccttcaaataagtctcgttgaacttgagcctccgttaaacctacggcattaatgggatcaagtgatgcgggttcatcttttaaatgtcgcactacttcctgttttttgtcgagtatcgttcctgatggcaccactgccgcattagcctgtgatatgagcaatccttgaacgacaagtgcacatgatataacgaatattttgcgcatgtctgtttcgtcctgtagtctataagcgagttaacttaataattataaaagcctgataaaaaggcacaatcactgattgcaaaaattttatcaattttaccgttttcactcttttattttagagatgtagacaaattttaatcatggttacgcattaacgaatattatcgttaataatttagtattaataatggttagttcaataagtaacaaaggagaacaacaatggcacatcaagtgactttacaaggtaatgcggtgactttagctggaaatttccccactgtaggccaaaaggcagccgatttttctttagtgggtaaagatctaaatgatgtttctttagcgcaatttgccggcaaacgtaaagtattaaatattttcccaagtgtagatactggtgtttgtgcagcgagtgttcgccaatttaataaagtcgccaacgaattaaataataccgttgtactgtgtatttcagcagatttaccttttgctcaagcgcgtttttgcggtgctgaaggtttagataatgttgtcacattatcaacaatgcgtggtgcggaatttaaagaaaactatggtgtcgcgattacgtcaggtcctttagcgggattaactagccgtgctgtgattgtacttgatgaaagtaacaacgttatctacacccaattagttgatgaaatcaccactgaacctaattatgacgcagcattagctgtactaaaataattgacaataacgttattcataccgagtaatgtaaaaaacaaacgggctaatatagcccgtttatttaaataaaaaccattaacacattgtaatataatattatttctctgttttatccgcttttttacttgttaaatcatattcacgtaatttatttgcgatcgcggtatgagaaatacctaaacgtttagccagtttacgtgtacttggataatcacgatataaacgccttaaaatagaagcttcaaatcgcttagtcatttcatctaacgagccttcaagcaaatcttcatcaaataaagtatccgcagtatgctcaggcaaggcgatatcttgaggtcgcaatgtattgcctactaactgagccatggcttgataaattgtatttcttaattgacgaacattaccaggccagccatattgtactaaataagcagataaatcaggggaaataacaggttttgatgctttctgctctaaacaatattgattaataaaatgcagtgctaacggcatgatatccgcttttctttcccgcaacggtggtagagttaatgtcaatacattaagtcgatagtagagatcttccctaaatagccctttttgtactaattcccataagtttttttgtgttgcacaaattattcgaacatcaactttaacttcgtgctcttcaccaacacgacggaaagtaccatcatttaaaaaacgcaggagtttaatttgcatttgtggcgacatttcgccaatttcatccagcaaaacagtgcctcgattggcttgttcaaaaaagccttttttaccttcgatagcattaggatatgcacctgccgcataaccaaataactcactttcaaccacatcatcaggcatagaggcacaattgaggcctaaaaatggctctctggctcgaggacttaataagtggcaagccttagcaaatagatctttgcccgtccccgtatcccccactaataataaaggatcatccatttttgccattttcttagcgcgttcaactaattgtttcatgggggtgctaacagcaataacttgttcaaatcccgaattatcattaacaattaatttcggatgctcatgaattattccgcgatatttcaataaaatgagtgcaccaacacaatgattaaactgattatcatcagtcagttttattggcacaatctccatatcaaaatgttgtttttttaatttgatggagataatttcagcatgaggatctttttgttctaaccagcgatggatattaaagttaggtatcagttggttaaaagatttttcatttttatcattttcatctaattcaaacagatgccgtgtagctgggtttaataacttaatttgacctttggtattaatagaaaagacagggacaggtactgattctaatagtgtccacatagctcgatgctcttgctctgatggcataaaagccacagtacgaacatcgataaccccctcaattcttctgatttcagccattaaaggttgaaatatattaaaatcgatttgcgaaaaatttagataaataagaccaataggaaagatttcaattccacgcaaatcgatattttttaatacaagcagatcgagtaattcgcgggttaacccgatgcgatctttacaggtaacttctaagcgcattttaaaccttcttaatactgagtgcccctgaactaattgctgatattatacattaatatcaattaaataaagggctttgtcagcaaaagttgacactattagcatttatttttacacaaaagaggtgatattttgattataaatgcttttttaacgcttttaaaaaattaaaacagaaaaatgttgaaggttgaatgatctcttttaactcataagcgataaaatgcttgatcctttccaataaaaacataagttctcttcttataaattttttgattgtacaacaaccatgagaaaaacaaaaaatgagataatctagtgcatatatcgctgctttctttttattattgttttttacatactcaaagatctgtgccgtttctttaattggtgataatagagcttgcttttgttgtgcatattttattttatcaattgcatcatccaaaataggcgttaaaaaggccaattgacggttaatatgagtaatattcaaagaagaaccaatataaaacttgcgtctttgttttgaaagtttttttattgttccaatcttcatttttctttcctcgtactttagatataaactaatataaaaacactattatataaaatactaaccagctaataatttaatattaaacatcatggcagttatacatttatattatgttgacgctatttatcatactaaagtaaataagctttactatcaaaaaaagaaaaaacgttagctaaatgttaaaaaaagaaataaaaacaaacaaatacaatgagttaaccaagcaccttaaagctattaatctttacttataactatttttttaccaatgtaataccaactaactttacaacaataaaatgtatattttttgatagaaatagattattcccttgcactcatgcacacatcacttttatatacactaacaattaatttagcgataaaaaaacctcaacaataatacttattgttgaggctattcaatttatattgaattaaagaatatattgataggtaactcactctttcttcttattacctaatgtattttttaattgaccgataagctcttttctaaagtcactcaatttaggcttattatcaatccagggtaatggacggcataactccattgctttaattcccaatcgggcagttaataatccagcgccaataccttgagcagcacgcgtggataaccgagcagccaaatcttgtgaaagccaatccattcccacttctctcactaattcagtcgccccagcaaacgcaatattgacgagtaccaagcgaaatagctttagtcggctatagtaaccaagttcaataccatatatttgtgcaatacgattaattaaccgaatatttctccaaccaataaacgccatatccaccattgctaatggacttactgcaatcataagggttgattccgctgcagaacgactaatttcagcccgtgcttgcttatctaaaatcggttgtactaattggctatataattctaaaatttctctatcgttatgcgtatcatgtaatgtactttgccaacgaatataagcaggatgttgtgaattaatacctgcttgtttggctaaatcttcacaaaaagggcgaccattccctattgcatgactatagagtaattctctcgctttatcacgctcgtcagcccgttggcgtaaacgataaatacgacgccactcagtaattaccgatcccatacccgcaataacaattaatcctcccgcactggctgcgcctaaagcaatccaatcagaatttatccatgattgatagatccactgtcccgcttgagcaataacactaacacctaaaatagtactcgccactgttattaagcgtttccataaactttttctaggctttagggccgattggatctcaccttctaaacgcccttcattttcctgtgcctctaattgcggattgtagggaacaaattgttcatcttgattgaaatcaagccctttttttaagctaatttcttcgttttgtaaggttgattgtttaaaatcaatacgtgattttaatggctcattcattttagtttatcccctaataaaaactccaaggcactatccatacgaatatggggaacggcactgtctctcgatatttgttgaggccggaaagattcaaaactaaatccttgcttttgccaaaatgccttttcaggcaatctcttaggaacttctcctggaaaataaacgagcggctgattatccgttagtcggtagccttttacggctgggattttttcaccatgatgatcgacaatgccactttctgtggcagcaatagaagcaagccccatacaatcaatgcttattccttcaaaaatagcattctgtttcgcatcttgaataagttgctgtaacaaagagactaaattttcatgctgatctggcgtgatatggtcagccttagtggctgcaaatagcagtttatcaatacagggggagaataaacgtcttaataaggttcgtttgccataatgaaagctgcgcattaattgtgtgagcgcttgtctcatatcattaaaaacatccgcaccttgatttaggggttgtaggcaatcgactaagacaatttgtctgtcaaacccttgaaaatggtcgcgataaaatccttttacaatatgttgaccataatattcatagcgcttttttaacataccaatattcgtttttttatcggcattttttaatttagcactatcgtattgcgttaagtcagcccaagggaaaaattgtaaaacaggcgcgccggataattcccccggtaaaacaaagcgtcccggttgaataaaatgtaatccctgttttttacaggctaataagtattcagtataagctgcggcgatctcggctaacagcgtttcatcagcaggggcaaagggatcacatttttttattaacgactgccactgttgcacaggtgccgttcgttgttgattaactctattcatctgctcagaccattcaaaatagtcttgctcaagcataggtaaatcaagtaaccattcaccgggataatcaacaatttctaaatagagcgatgaagtttcttttataaaacgcgttaaagactcatgagagcgatagcgtaattgcaaacgtatttcactgacacccttagtgggaacaggccaactaggtggcgtatggtaaagtgactccatagcttcatcataagtaaagcgtggaatacttaagttatgttgcggtatacgtttaacccctaataactgttggttgcgtgccgcagaaaataaaggtaaacgcgccccactatgtacattggtgagttgattgactaaagaggtaataaaggctgttttaccactgcggcttaaccctgtaacagcgaggcgtaaatgcctatctacgcctcgattaatcagtgcagttagttcattttgtaagcgtttcatgtttctcccaagacacgtgacgcgataacttatctagccccatttttatcataggctcagctatcaatagaaccaaccaacgtaacggtttataactcacacgttttaatataccgccggttattgcggctggcccaaataaagttaataacgttaaagcaaatgttaccccttttttcgcccatttagtgagtttatttgttttaacggttgtcggtatcaaagtggaattcatcattcctccttaataagcaaatggtttatatccaaataaagacgctcctagtattggagcgtcatattagattaagtggcaagaaaattataaatcttgaaagcgtttattgagctgataagtcgaagaagtaatataacgttccatttgttgtaaacgtttttcaccttttgttaattgactatccacttcttttaaaatagcttttaaatcctcttgctgttcctgatgttggttataattatcaggtgcaggctccataaagaaacttaaaacaagataaacaacaatggttaagccaaaaaaaccagcaaagagtgcaatcaccgcaataaccctgactaatagcacaggaatattaaaataatgggcaagcccagcacatacgccacggatcatgccttcttgtggcaagcgatacaatgatttgctctgcatcgtcattatgattgcctccagttaggatgttctgcatcaagaatatcttctaatgtcttaatgcgttcctgcatttgctgagctttatccaccagcgcgctcagtcgctgcatttcttgttgggttaactgaaccttccctccccctttttggctgttatagtgcaaccataaccaaataggaagaataaataacacaaaaattgtcagtggtattcccagaaatatatagcccattacatatcctttataagatggttattacgcttgctgttactctttattagtattgattttagcttttaatgccgctaattgcgcgctaatttcatcatcggctttcagctcagcaaactgttgttctaatgatttttctttacctaatccatagctttgcgcttcgccttccatatgatcaattcgacgctcaaattgttcaaagcgcgccattgccgcatccattttaccgctatctaattgacgacgaacctgacgtgaagagtttgcagcttggtggcgaaccactaatgattgctgtttagcacgcgtttctgtcagtttattttctaattcactgatttcacctttaaggcgatctaatgtttcatcaatgatgattagttcatgttttaaggtatcgcacattgaagcaatacgttgtttttcaattaacgccgcacgtgctaaatcttctttatctttaatcagcgcgagttccgctttatcttgccaatctttaatttgtttttctgcttgctcaatacgacgctctaagctttttttctctgctagcgtacgtgcagaagttgttctgatctcaactaacatgtcttccatttcttggatcattaagcggatcattttttcaggatcttctgctttatccagcaaagaagcgatgttggcattaataatatcagcaaaacgtgaaaatatacccatgatgttatccttaatagctatgataaataatagccttgagtgttgattaaatagcgttattaacaataacgcccagttgctatagttaatacaatttgcgtgccaacttttcaaaacaacttaacacattaataaataacattttatttttcctcgcctattttttacactactgatagactggtgagaaatacctcaatatggtgattttaaccaatgcaagagaatttagagacaataattggtgttgatagtcattttatcgatgttttagaacaaacctcagccctcgctcaactcaaaaaaccagtattgattattggtgaacgtggtacaggtaaagagcttatcgctcatcgattacactatttatcaccttggtggcaaggaccatttatttccattaactgttcggcattaaacgataatttgcttgattcagagctgtttggtcatgaagcgggggcatttaccggagcgaaaaaccgccatcaaggacgttttgagcgtgccgatggcggctctctttttcttgatgaactagccactgcaccgatgctggtgcaagaaaagttgctacgcgttattgagtatggccatttagaacgagtgggaggtagtcaatcgctgcatgtcgatgtgcgccttatctgtgccactaacgcagatctaccggcaatggcggacgagggtaaatttcgtgctgatttactggatagattggcctttgacgtaattcgcctgccccctttaagagagcgtaaagccgatattatgctactggctgaaaactttgcgattgctatgtgccaagagttagggttgccctttttccccggttttagtgacaatgcccgccaaattcttttagattaccgttggccggggaatattcgcgaactaaaaaatgtggttgaacgttctgtttatcgccatggcaccagtgagcgtgaactggataatattattatcgacccttttgcgcgcttttcgtcttcaaccatagctgagcaacctcagcctcaaaaggagatgatcttttcattaccgccattaccgctagatttacgccagtggcaacatagcacagaaaaaaacttactagagcaagcattgaaagagagtcgttataaccagaagatggcggcagaaaaattagcattgagctatgatcaattacgcggattaataaaaaaacatcacataaaattgtcggtctagttttgtataagatgagcaaagacagaatgaaatacagacaaaaaaaaagccagcacccgagctggctagtaaaataatactggaagcaatgtgagcaatgtcgtgtccttgtgcgaaaaacctctatcgccaaaggacaatacggatgataatctttatcattagcgtttgtaaagctttttattgagaatttttctcaatttgttttttttgacaattttgggctagccagttttttaagttacaatagccaaatcgtttatctaaaagacataattatgcgccctattttacttattagtactatgctactggcttcaataagtatgacttgtatggcagagatagctaccaaagctacagagctatctgtcgcgcaagagcctacaaacattcatcaaaatggctttgtctattgtgttgatggcagtgtaaatacctttaatcctcaactttcgagcagtggattaattattgatcccctagccgcgcaactttacgatcgtcttttagatgttgacccttatacctatcgtttgatccctgaaattgccgctcgttgggagtctctcgataatggcgcaacttatcgcttttatttgcgtaaaaatgtgtcattccagacaacaccttggtttacgcctacacgtaaactcaccgcagacgatgttatctttagttttgagcgcatgttttctgccaataatccttataatcaagttaatggtggtaaatacccctattttgatagtttaagtttggcggataatatcaaatcaattaaaaagttaggcaaatacaccgttgaatttaatctaaaatctcctgatgcttcatttttatggcatttagcaacccattatgcgcctatcctttcagaagaatatgccagtaaccttgaaaaatcgggtaatcaatcgcaacttgattggaaacctgtaggctcagggcctttttatcttgatgaatttcagccaggccaatttgttcgattactgagaaatgagcaatactggaaaggtcagcccaaaatgcaacaagtggttatagacacgggtgcaggcggtactggacgtatatctaaactcttaacgggagagtgtgatgttttggcctatcctgcggcaagccaattaaaggtcttacgtgatgatcctcgtttacgccttacattacgttcaggaatgaatattgcttatcttgcgtttaatactaataagccaccgtttaacgatctaaaagtgcgtcaagccatcgcttatgcgattaataatgaacgactaatgggatctatttattacggtacggctgaaacagccgcatcggttttacctcgtgcctcttgggcttatgataatcgcgctaaaattaccgaatataatcctgaaaaatcgaagcaaatattaaaagagttgggacttgaaggacttaaattaaacctttgggtccccagtgctccgcaatcttataatcccagcccgttaaaaatggctgagttaattcaagctgatttagcccaagtaggtatccaaatgaatattcgacctatagaaggtcgctatcaagaaaccagtttgatggatagaactcatgatatgactttatcaggatggtcaacggacagtaacgaccccgatagttttttccgcccattatttagttgtgcggctattagttcgcaaaccaatttaagtcattggtgctcaccggcatttgacaatgtgctacaacaggcgctttatagccaacaactggcctctcgtatagactattatcaccaagcacaagatattttagcgcaagagctaccggttttaccattagctaattctttacgtatgcaggcttatcgttatgatattaaaggacttgtattaagtacatttggtaacgcttcttttgccggtgtgtatcgcgaagcagaagttgatgaggatagtcacaaccaagaggctacaacaaacccatgattatctactcgatacgtcgcttactgttattaattgtgacgctctttttcttgtcactggtgagctttagtctcagctattacacacccaatgggccgttaagtggtgcttctttatttgatgcctactttttttatacccacaatatgttccattttgattttggaatttcttcaattaatggcgaacccattaaagcacaacttattgaagcatttcctgccactatggagttatgtgcactggcatttatctttgccctgcttatcggcattcctgcggggatcatcgcgggtgtatggcgcaataaacctgcagatacttttattagtcatctcgcacttttgggcttttcagttccggtctttggtcttgcattattactgacgcttttcttttcattaaagctaggttggctacctgtttcaggccgtattgatttactgtataacttacagcctataacggggatcgcaatcgttgatgcttggctatcggattcgccttatcgtcaacagatgatcataaacgttttgcaacatttaattctacctgtgactacactagctattgctcctactacggaagtcattaggttaatgcgtaatagtacagaagagatcatggtcgagaattatgtgaaagcagcggcaacccgtggcttatcacgctttactattattcgccgtcatattctacataatgcattaccccctattattcccaaattaggcttacagttttctaccatgttaacactgacgatggtgaccgaaattgtttttaactggccaggattaggccgttggctagtaacggccattcgccaacaagactattcggctatttcagccggtgttatggttgttggttcaatggttatcatcgtcaatgtgttatcagatattgtcggtgcgatgagtaatccaatgaaacacaaggtgggatatgcctttagatagccagttttataaagagaaaaaaacaccatcaccggctgcggtgatttggcaatgtttttctaaagatattctctccatggtgggcttttatggtgttatcttcctgttaatattaagtattgttggtccttatattgcgccttatgcactcgaccaacaattcttcggtcatcaattaacaccgccttcttggtatcaaaacggtaatgtcaccttcttttttggtactgatgatttagggcgcgatgtctttagccgtattttaattggtacgagtatgacctttggtggcgcttttattgtcacctttgcggcgacactgatgggattaattatgggttgccttgcaggaatgacccacggcctaaaatccgcagtgttaaatcatattttagatacactgttatccattccatcactcttattagccattattgtggtcgcttttgtaggggcaagtttagagcacgccatgatagcaatttggctagcactactcccccgcttagtgagaatgatctattcagcggtaaatgatgaattaaataaagagtacgttattgcctcacgtcttgatggtgcatcaaatatctctattttatggtataccgtattgccgaatattaccccagtattggtttctgaattaactcgggctttttctatcgcaatattagatatcacggcattaggttttctgaatttaggcgctcaattaccttcacctgaatggggggcgatgctcggcgattccctagagttaatctatgctgcaccttggacagtccttatccccggagccaccattatgatcagtgtattacttgtcaatttattaggggatggcttacaacgtgccattaatgagggggtggaataatgccgttattagacatacgcaacctaactattgagtttatgacacccgatggcccagtaaaagcggtagatcgcgtttccattaccctcagtgagggagaagtaagaggtttagtcggtgaatctggctccggaaaaagtttgatcgctaaggcaatttgtggcgtgactaaagataatattaaagtgactgcggatcgctttcggtttgatgatattgatttacttaaattgtcaccaagagcacgtcgtcgggtaattggtcataatgtgtcgatgattttccaagagcctcaatcttgtcttgatccggcgaccaaaattgaacaccagcttattcaagcaatccctggttggacatttaaaggccactggtggcaacgttttcattggcgaaaacgccgtgcaattgagttacttcatcgggttggtattaaagatcataaagatatcatgcgtagctatccttatgagttaaccgagggtgaatgccaaaaagtgatgatagccattgccattgctaaccaaccccgtttactgattgccgatgaaccaactaatgcgatggagccggcaacgcaaacacaaatatttcgtttactcacccgtttaaatcaaaataataatatgactattttgttaattagccatgatttgcagtggatgagtaaattagccagtaaaattacggtcatgtattgtggtcagaccgtggaaaccgccatacctgaagaactattggttaccccctatcatccttatacacaagcccttatccgctctattcctgattttactaactctttgcctcataaaagccgtttaaatacgctacccggtgcgatcccctctttagagcacctacctgttgggtgccgtttaggcccccgttgtccttatgcacaacgtcaatgtattgaagcacctcgattacgtacatttaaaaatcatgcggtggcttgtcatttcccattaaatgtggagacgacagatgttcgataaattacttgaagtcaaaaacttatcaaaaacatttcgttaccgtacaggattattccatcgccagcagttgaaagcggtaaaaccggtgagtttcactcttgaaccgaagcaaacactggcgattattggcgctaatggttcaggtaaatcaacattagctagaatgttatccggcgttacagagccaacggggggtgatatttttataaacggtcatcaattaagttttggcgattactcttatcgtagtcaacgcattcggatgatatttcaagatcccacaaactcactcaatccacgtcagcgtattgggcaaacattagatttaccattacgacttaataccgaacttagtggcatagagcgagaaaaacgcatttatcaaactttgcggcaagtaggactattaccagaacatgctaattactatccacatatgtttgcctcaggacaacgccagcggatcgccttagctcgtgctcttattttacagccacaggtgattatagcggatgaagctattgcctctttagatatgtctttacgttcacaaattattaatttgatgttagagctacaagagacacatgaaattgcctatatctatgtgacacaaaatttaggaatgactaagcatattagtgataaagtcatggtgatggataatggtgaagtggtcgagcgtggtaacaccgctgaggtattagcatcacctttacatgaagtgactcgtcgattagtggctagtcattttggggaagcacttacggcagaagcttggcgacaagatttaccttaatattaaacagcattaacatcatattaattgtttattatttcacccttttccttcaactcctcggaggtgcaagggaaattaaacaaatttacaaatgtcgtggtagaatcagccacgatttattaacaataagcgtgataacctaacagataaataaaattctgcatgatgttattatcgcaatttacgaacaaacaaggatacagctatgggctttatgaccggcaaacgcattctgattactggtgttgcgagcaaattatcaattgcttatggtattgccaaagccatgcatgatcaaggcgctgaactggcttttacttatcagaatgaaaaactcaaacctcgcgttgaagagtttgcagcctcattaaattctaacatcgtattagagtgtgatgtgtcaaaagatgaaagcattgacgcaatgtatgcagagctagcaaaagtttggcctaaatatgatggttttgttcactctatcggtttcgcacctgctgaccaattagatggcgactatgttaacgctgtcactcgtgaaggctttaaaattgcccatgacatcagtgcatatagctttgttgcaatggcaaaagcaagccgtgcaatgttaaatccaaactctgcattattaacgctgacttacctcggtgctgagcgtgcaattcctaactataatgttatggggttagctaaagcttctctagaagcaaacgtacgttatatggcaaatgctatgggtcctgaaggtattcgtgttaacggtatctctgcaggtccaattcgtaccttagcggcatctggtatcaaagatttccgtaaaatgttaaatcattgcgaatccgtcacccctttacgtcgcacagtcactactgaagatgtgggtaatactgcagctttcttatgctctgacttatctggcgggatcaccggtgaaatcattcacgtagacggtggttttagcattgccgcaatgaatgaattagagttgaaataatttccctttatttcattacattctttctaaaaacctcgaaattcttcgaggttttcttttttcatgaataagttgtactgttcacagatttacaaaagcctattttatttgccagatttgcgtttgctaaattcttataacgccttattatctaatgttagtgaggatatttcttatcttcacgggtatcaccactcattgatagggagttatttaagatgaaattgtactacacgccgggtagttgctcgctttctcctcatatcgttctacgtgaaacgggtctcgacttttctattgagcgcattgatttacgcaccaaaaaaacagagtcagggaaagattttcttgccatcaaccctaaagggcaagttccggttcttcaattagataatggtgatattttaacggagggtgttgctattgtgcagtatcttgccgatctgaagccagatagaaatcttattgccccaccaaaagcattagaacgttatcatcaaattgagtggctaaactttcttgccagtgaagttcataaaggctacagccctctattttcatctgatacgcctgaaagttatctccctgtggtaaaaaacaaactaaaaagtaaatttgtttatattaatgatgtactaagcaaacaaaaatgtgtttgtggtgatcactttactgtggcggatgcgtatctgtttacgttaagtcaatgggcacctcatgtggcgctagatttaaccgacttaagccatttacaagactatctagcacgtattgcacaacgtcctaatgtgcatagtgcactagtcacggaaggattaataaaagagtaagattgctataaaggcgagtctcattaataaacataaaaagcggaaattaatgacttccgctttatattaacaatatgattaatctaactgcgttgcacagaagttatgggttgggtgcaccatttgatcttgagcggcgacgagttgtaactcgtactcattcatctctttagtttttaacatcacttcataaacagcagcagcaacatgctctaatgccgtttttagctcaacaccttttagtaaatccaccagcattaaaccactggttagatccccgacaccaacaggctgacgttcaccaaaatcaaccagcggtcggctcacgtgccaactgtgatctgcagtcaccagtaacatttcaaagcgatcatgacgaaagcctgctcgtgataaatgttttactaatacaattttaggcccttgctggcataattgacgggccgcttttacacattggtcaacattatgcagcgttgctccaccagctaatgtttcaagttctaataagttgggtgcaataatatcactgatgggcaaagcatcttcacaaagtacgccagaaacttctggaggcacaatacaacctttttcaggatgtcccataaccggatcacaaaagtaccatgcgttaggattagcttgtttgactttttttacaatatcaacaatgcgtcggccttgctctgccgagccaagataaccacttaataccgcatcacactgtgctaatttaccaatagcagcgataccatcaacgatctcagtgatatgctctgccgacatcacacaacccgtccatttttctggatattgtgtgtggttggaaaattgaaccgtatttaaaggccaaacatttacccccatacggcgcattggaaattcagcagcgctattacctgcgtgaccaaaaactacatgagattgaatagagagtatatttttcatgacataaaccgattattgtgaatacacacaacacccaagctttattatcataggcgaggtatacacatttatttattgttatcaaaaaagggcaacctactgttgcccttttgttgtcaattatttccagataacaaggcagtaatgttttttaccgcgacgtaaaatggaataatgaccaaataagaaatctttttcttcaaagacgtattcaggattatcctgtttttcgccattaatagatactgcgttagagccaatcattgtacgagcttgaccacgagaaggaactaattctgcattgaccagtgcttgttgtaaatcattgcctttttctaactcaatagttggcataccatcttgcgctaattgttcaagatcagcttgcgttaaatctgcaatagctcctgaaaataggctatcggtaatacgtttagcggcagttaaaccttcttcaccatgaactaaacgtgtaacttgttctgctaacacacgttgggcgcgaggtgcttgaccgctgtttttatcttcctcttccagtgcattaatctcctcaatgctcataaaagtgaagaattttaagaagcgatacacatccgcatccgcggtattgatccagaattggtagaatttatatgggctcgttttcttcggatctaaccaaacagcaccaccttctgttttaccaaatttagtaccatcagatttggtaattaaaggtactgtcataccaaatacttgtttttggttgaaacggcgagttagatcaatacccgaagtaatgttaccccactgatctgagccaccaatttgtaactcgacaccgaggtttttgtttaatgacgcaaagtcataagcttgtaacagattataagcgaattcagtaaaagagatccccacatcgtcacggtttaaacgctgtttaaccgcttctttgttgatcatttggttcacagagaagtgtttaccgatatcacgcaggaaggttagcacatccatttgaccaaaccagtcatagttgtttgctaattccgcactgttttcaccacggtcgaaatctaagaaaggtgacacttgtttacgaattttttctacccactcgtgaacagtatcttgggtattcagtttgcgctcggtggctttaaaactaggatcaccaataagacccgttgcaccacccaccaacgccacaggcttatgcccggctagttggaatcgttttaaacacagcaaaggaaccaaatgccccaagtgcaggctatcagcggtaggatcgaagccacaatagagagcgataggaccttgctccaaacgctccactaaagctgcctcatccgtgacctgagcgataagcccacgctcctgcaattgtgtgattaggttcttgctagacatcaatgactccatcggtttattgttttttgtctatttaaaatataagtgaaacacaagtggtatagcataaagcgccactacattaagtaccagtagaaaaagcctttttgatacaaatttattagcccaattaaggtgctaaacgttcaatagaccatccttctggtgatttttggtatataaagcgatcgtgtagacgattttctctaccttgccaaaattcaacagagtcaaaagtgactcgatatcctccccagaaactgggtagaggtacttctccatgttgaaatttttgttttaactccaaaaacttactttcaagcaccccacgggcagaaatgcgagaagattgttttgatgcccaagctgctatttggctatctttaggacggctatggaaatattttacgacttcaaatgctgaaagtttctcagctttccctaaaaaacagacttgtcgctctaaaggataccaagggaagagtaaactgactctttggttatgttctaaatgactcgctttacggctacctaagttggtataaaaaactaaacctttttcatcaaagtgctttaacagcacaatacgttgataaggttgtccattttcatcaacggttgccacacacatggcagtaggatcacttaagcgagcttcacaagcttgcttaagccatttttcaaataaaactaatggctgttcggttaattcatgacggcgtaatccacctttcatatattcacgtcgaagatcagcaacatcaataaaatccagatctgtcatttttcactctctcttttgagatactgtgctcagcatatcacgcttatcgaggatttgtaggataaatcgcccctaaaattgtttctcgtgatgcccctgtaacagaaggtaaattgccgggttcatttgccattgttcgtgcggccaaccacgcaaaagctaatgcttccatatcatcgccactaagaccatatttgtccgttaacgagacttctgtacccggtaataaactagcaagacgatgcataatttgaccgttttttgccccgccaccacacaccaataaacgctcacatccaccattgagttgtacttgctgtgcaatactgatagcggttagctctactaaagttgcctgtacatcctctggaaatacattgggtactttagccaaatgataatgtaaccattgggtattaaaatattctcgtcccgtactttttggcgctgaacgagaaaaatagggatctgccagcatttcctgtaataattgggtattcacatttccagttgctgcccattgcccattatcatcataggctgtctgattatgaacccagttccaactgtctaacagcatattgccagggcctgtgtcatatcctttcactgcaacgccaggtaatagcagcgaaatattggcaataccaccaatatttaacacaatgcgtttttctgtaggatgacctaatactgcaagatgaaatgcaggaaccaatggtgcaccttgcccaccatatgccatatcacgacgacgaaaatccccgacagtggttattcctgtcaaggcagccactctattgttatcaccaatttgcatggtaaacgggatatcactttctggctcatgccaaattgtttgaccatgacatcctatcgccgtgatatcagcagcacttaatcgcgctttcgctaataattccataatagcttttgcatatagctcacccagttgcgcatctaataagcctaactcatgcaacgtcacaggttggccttggcaaacggctaaaatgcgttgacgcaaggtttgaggataaggtaaaaaatggttggcttgttgggcaaccagtttattactaatggcggccaataccacatcaacaccatctaaacttgtaccagacatcacaccaatgtatcgccctgctttcatgtccttttccttataatcaagatgatgcaactttttaacatataatgttatattctttttttcggaaatctcttcagtgtttacttgcgctctttactatatagtaagaggtatacgattaaaatcagtgtcgacatatgcaaaaaataagctataactgatattaaattaaattgatataatctgaaaaattattatcagatttccattaggagtaattatgtttaagcatttacttgttggtctttttgctgtgacaacgctggctggttgtgtaaatacaagctctttatcaggtgatacttatacagcaagtcaagctaaacaagcacaaaacgtaacttatggcaccattgtttcagtacgtgcagtaaacattcaagccggtagtgatgaaaatgttcttggtgctatcggtggtgccgtattaggtggtttattaggtaatacaattggtggtggtacaggccgtaacctagcaaccgcagcgggtgctattgctggtggtatggctggacaacaagcacaaggtgctttaaacacaaccaagggtgtgcaattggaagtacgtttagatagcggtaaaactgtggttgtcgtacaaaaagcagacaatactgcctatagacaaggtcaacgtgttgctgtgattggtaacggcaataatctcaccgtttctccacgctaagtttatttacttgaggtgtgtgataagcaaaacaggcaaccattctagttgcctgttttattaatagaaattattttacttataataaccagttttataacttattaattaattcaaacattgcattatctatctttaattaatgataaaaatcactcgtcttttatcatcaattattaattgataacgcttttattataagatcaacaatagacttcatagataaaatcatcttatctaccctctagtagaattataataaatcctttgaaattaaataataaatagaattattacaaataaaaccattagaaataaaattgctgtaaattagcccaatttaattagtcatgtaatctaattatatttttctctagctttttaataagataaatcaagttgtctatttcttccttctttataccacttaatatttcttgacgtgtcttctcaataactgcataaacttctgaaataaaaggttctgattcttttgttaacgttatacgctttgctctgcgatcacttgaacaagtatgtctacaaatcaattttttttcttctaactgatcgagagttctcactaatgatggttgttcaataccaattgctttagccaattggatttgagattgttctggaggcagttgactaatattatacaacgttacccaatgagtttgggtcaattttaatggcttgagtcggtgatcaattaaggcacgccataatcgaactaaacgcgctaaatcagctcctaatgttgattccacttatccctccttaaattcgcttttctttcagcttttacaaagtttagatatgttctttaaaaacactattttgtaaattacattatttattgattgatgagccgacctctttatcttatttttataatattagaatcctatttattagataggaaattatttttaagatccaattatgtatatttatcgccacgaatgaatctctataaagaataaccttgttataaaaactaatctatatttttttacataataatcattattatttcacaagaaaagccgagaaaacaaaaaaaccttacaattcacggaattaaaaaccattaacaaaacaaatatttacaatgaatattatttaccttaaaaattaaataaaatgaactaactaaatacaatcaataaactaattaaattatattaaaacgttagttttattttaaaatttaaaaataaataataaatttaaaataaatccagctgttcattctctttttctgtttcagacactgttttttgttgagctcttaaatatcgttgtcgacaaagtctcaatacatttcgtttttcttgttgactcatcgttgaccaactaaagcgttcttgacgactacggtaacaaccaatgcaatacccttgtaaattagattcacatcgaccaatgcaagggcttgggatatcgaagaattctaattgttcttgcattgattattctccccaattatttgttactatagagtatagtaaaaagagatattatctgcccatttactacaatactgatgagtaaagcgtaaattgaactatagggctgtaacgcgttatagtacaacaccatcagtttatactgtcgggtgtcatatttaacaaacacgagaggtttatatgcgagtacttcataccatgatccgtgtaggcgatttacaacgctctatcgatttttataccaaagttttaggtatgcaacttctacgcaccagtgagaatgaggaatataaatactcgttggcttttgttggctatggtgatgaaagtagcggtgctgttattgaattaacctataactggggtgtgactagctacgaaatggggactgcatttggccatgttgcattaggggttgatgatgtagctgcaacttgtgaggctatccgtcaagcggggggtaacgttacccgtgaagcaggccctgttaaaggtggtacaacaattatcgcctttgtagaagatcctgatggatataaaattgaattaatcgaaaacaaaagtgccagtcaagctctgggtaactaaatattagtaaaaccagaaaggcattgtattgcttttctggttcctgattattattaatttctgatgtgctattttcatcggataagtacagtttaatgcctgataaaataaaccctaatgaattatgtaaccgctttcgaggttactatccagtcgttattgatgttgaaacgggtggatttaatgccaaaacagatggcttacttgaaattgctgctatcactttaaaaatggatgagcaaggttggttaaaacctgataatacattgcattttcatgtcgacccctttgagggcgcaaatttagagccagcggcgttagaatttaccggaattgatcctacaaatcctcttcgtggtgctgtcagcgaatatgaagcgttacacgccatttttaaaatggtacgtaaaggaatgaaagacgccaactgtaaccgtgcgatcattgtggctcataatgctaattttgatcatagctttgttatggcggcagctgagcgagcaggtttaaagcgtaaccctttccacccttttgctacttttgatactgcggctttaagtggtttagtactaggacaaactattttagcgaaagcctgtattactgcaggtatcccctttgatagtaaactcgctcatggggctttatacgataccaatcgtacatcattactgttttgtgaattagttaaccgctggaaaaaattaggtggttggccactaccaacgccctaatcaaacttatgtgtttggctgtgccatattaagcgacaaaaaagaagccagtgcaaataatgtactggcctctttttttaattacggtcaatttaaatcatggtgaaaaacgcaatggggattatgcttcttcttcaccacggtatttatctgcagtctcttttaataacttctgcaattcaccgcgctgatacatttctaagataatgtcacaaccaccgactaattcgccatccacccataattgtgggaaagttggccaatgagcatattttggtagctctgcacgaatatcagggttttgcaaaatatcgacataagcaaaacgctcaccacaagcagaaatcgcttgaacggcttgtgcagaaaatccacagcttggtaattttggtgatcctttcatgtataacaggatgggattttctttgatttggcgttcaattttttcgatagtcgtcatttattaagtccttacaacctttttatattcagtatgttttatattgaggaaaacatgaaagaagaataccactttatataagaaagctctatataagtttagttatgtatctaaatcaataaattacggataaatcaccctataattgatgagaaaacatacgacaaggcatgacgatctgggaacaaataaaataagattaatgttggcttagcgaaaaacgccgtaaaccctcgcccaatgtgaagtgcccccataaaaagcacctaaataagtgtataaatgcacattacagtaaagaacaccagataatgttttagtcgacggatatctgatgtccctgatcacacaaattttcaacgtcaatatcaatatctcgttaaattggatattgataaatttcgttatttaataggcttaacaataatatcccaacctgtagtacctgaagcgtggtaataataaccggcttttaattgctctggttttttacttggcccttcagcaactaaagtagatttcgttgagttattatcaatacgaattacaccaccgcgaatacgatctaattcattaccattgaacaaggtaatttgtggtgagaaatgcgcatcacttaaatcaatatggataaaagtgtgccctgcatcataagcggcttttaattctttatctgtaatgtctttaccattctcaaagggtaagtcaaaaaatgcttttggatcaattttagcagtcataaatactcctttttatgaataaacatcaatcattagttcaatttaaattatagataataattaaacattctgataaatatcctgctcacgctctgtaagatatatataaattatttatatattcaataaattaacttacccatcttttgttttgcttttattcaatagagatagaacaataagtaaaattaactaattgtttatatatataaaaatgagatgttatttctaatagggatctgccattatcatggactcgtcaaaactcgcatatttaaacttatgagtatttagtaatggaaatgattttactgtttctgattgtgggatgtataactggattttttgccggattgttaggaattggtggtggagccattattgttcctattgtgatgtatgttgttagccaacaagctatccctgcagatatggtaatgaaaatcgccctctcaacctctttttctgtcattatattttctaccgcctcttctgcttattcgcataataaacataaagcgattttatggtcacaatttccgctcctcgctgtaggcactcttctcggtatgctagttgggacattcctagtacaaaaactctcaaataccctattacaaattatcttttgtatttttatggcctataccatatatggattactgaccaagaaaaaagaagctgaacgtgttgagaatgcccaagatccggtggtttcaaaaccagcactgacaaccggtggtagcttagtgggttttatttcaagttttattggtatagcgggtggcaccataacaataccgctattaagccactgggggtttaatacccgtaaatgtattgcaacatcatcaatgctgggtgtgattatcgccactattgggactgttatggggatcgtttatggttggcaacaaactgaattagcagactattatttaggttttgtctatctacctgcttttattggtattagtattaccagtatacttacagcccctatcggcgtaaaagttgcctataaactacctattgccagagtacgccaaatatttgccctattcttattaatcgtcatggctaaaatgttatataccctgatattgggatagtgttttaacactttacctctatcttagtgagagatactcttatcaatataactaatctatatgttctatactaatagataaaagatatttagctgttatttcaatgaatttttgttaaaataattagcaaaatagtaacaacttagtgagttcatttgcctcattttatcaattcagttgaattagatggaatggtttaaggcacaaaacccgaaaatgataggataaaggagtacgcaatgtctttcgaattaccaaaattaccttatgcgttagatgctcttgagccacatatctctaaagaaacattagaataccactacggcaaacaccaccaaacttacgtaaccaacttaaataacttggttaaaggtactgatttagaaaataaatctttagaagagctcatcaaaactactgaaggtggtattttcaataatgctgctcaagtttggaaccatacattctactggaattgcttagcaccaaacgcaggcggtgcaccaacaggtaaaattgcagaagcaatcaataaagcgtttggctcttttgaagagttcaaaaaacaatttaatgatgcagctgcaaaaaactttggttcaggttggacttggttagtgaaaaaagcagatggctcattagccattgttaatacatctaacgctgcaacacctgtttctggcgaagataaaccactgttaactgttgacgtctgggagcacgcttactacatcgactatcgtaatgcacgtgtgaaatacttagaagagttctgggcactggttaactggtcatttgttgaagcaaatcttgcttaattgactgtttcagagatgggaaaaccatttttgataatctaataacaaagggcctagtgccctttgttatattgatatatttgattgctcactttggatagctaaaatttaagtaaataattagcaattaacaatcaaaacaataaacttgcatatattacgatcataaccagtgctgctactgcggtacttaaaccaaatttcagatccgtatccatctatttctccctcaaaatgattataatactcagattaaaccataatcttgtcatggttaattattattacatatcaagttttgctaaaatagcgactagagcacaatttataacattgattaatactttcacttttgagctagatcatacaaaattcacagctaatcgctaaattattgccagtgtttgccctatatatgactatactggcagttaaaccataaaatgaattaaaagagaccaatgaaggtcaggagttttccacaccatggcaacaataaaagacgtggcaaaacgcgcaggcgtatcaaccacgactgtttctcatgtgatcaacaaaactcgttttgttgctgagaacacaagagcggcagtttgggctgcgataaaagaattaaattattcgccgagtgctgtcgcacgtagtttaaaagtcaatcacactaaatctattggtttattagccacgtccagtgaagcaccttactttgctgaagtgattgaagctgttgaaaatagttgttatagcaaaggctacacgctaattttatgtaattcacataataatcttgataaacaaaaagcttatttagctatgttggcacaaaaacgtgttgatggtttattagtcatgtgttcagaatatcccgatcatcttctttctctcttagaaggttatcgtaatattccgatggtcgtaatggactggggaaaagcccgcggtgactttactgataccattattgataacgcattccatggtggctatatagccggtcgttatcttattgaacgaggtcatcgtgatattggtattatccccggccctctagagcgaaataccggaggcggtcgtttacagggctttttaaaagccatggaagaagcgaaaattacggtaaaagaagagtggattgtacaaggtgactttgaacctgaatctggttacaaagccatgacccaaatgctcaatcaaaagcaacgccctactgccgtattttgtggcggtgatgttatggcgatgggagcaatatgtgcagctgatgagttaggattacgtgttcctgccgatatttccattgtcggctacgacaatatccgtaatgcacgctatttcacaccagctttaaccacggttcaccagccgaaagagcgtttaggacaaatggctttttccatgttactcgaccgtattgtgaataaacgcgaggatgcacaaactatcgaagtacacccgcgcctagtagaacgtcgctctgttgccgatggtccatttattgattatcgccgctgatctccttcattaacgaagccattcctcatttaaggtttggctatcgcctagataatctaatagccaagttaatgccggcgattcgcttttatcaacccatgttagacagcacggactgtctggcaagggttgtgctaaggtaagggtaaccaacttaccttgttcgattaatggctccgctcggtgccaaggcaccataccaacacataatcctgctaataaacactcaagccccatatcccatgaaggtactatcattcggcgctgattatttaatgcccaagtatctcgttttggtaaactacgtgaggtatcttctaaacataaactaggataaggccgtagttcatcatcggttaatggatgtgccgcgcttgcaagaggatgatcagcatgacacacacatcgccacggcataaagcccatatctttaaaactataacgttcaccaataggtgaagctctagtggcaccaatagccaaatcaacacgcccgttcactaatgaatcccagacaccgttaaaaacttcaggataaacatagagttcgatatcaggaaaatggcgataaaagtccagaataagttgctgtgttctagccggtttgacaataccatccacggcaatgctaaactgcccccgccagccatttgagacttgctggcacatatggcgagtgtcattcatttttttgataacagaacgggcttctttaataaagatcttacccgcatcggttaattcaacatcacgatgccggcgttcaaacaaaggaacggcaagccattcttctaattgtctcacggtgtaactcaccgcggagggtactctgtgcaattcttgagcggctgagctaaaactccccgttctagcgacagcatcaacgacctctagcgagtattctgaccacataatatttattcctttgaatttttttcacagcattaaccaaatattcccgtttcacaagtaaaatcactcttagctacaatatataaaatgttttacatcacataacatagaaaattaaaatgactttaaagaattccacacaatcaaaaacaccttctctctttatggtgtatctcgcctgccttagtatgctgggctatttagctatcgatatgtatctgcctgcatttggtatgatgcaacgcgaattatcaatcagtgaaggcgccgtcagtaacagcttaagtatctttctatttggctttgctgtcgctcaactactttggggaccactctcagacaaattggggcgtaagcctattttacttattgggctaagtttcttctccctaggttgtctaggtatgctttgggtagacagtgctgccggtttactaaccatgcgcttcttacaagcctttggcgtctgctctgcagccgttatttggcaagcactagtgatagaccgttttgatgagtctcgcgctcaacacgttttcgcatcaattatgccattggtcgccctttccccagccttagcgccactcattggtgcttttctgttaaaccacggtggctggcgcatgatttttatgttgctgatggcaattactcttgtattaatgctacccacattgatgctaaaaaatattaaacaaaaatcagttattgatgcaggcccatctacagtatcatttttaactttgcttaagtcacctatctatgccggtaacgtattagtttacgcgtcctgtagtgcgggtttctttgcttggttagcaggctctccgattatccttgagaagatgggttattcaccacaagatatcggcttaagctatattccacaaaccatcgcatttatggtaggtggttatggttgtcgcattttattatcaaaaatgtcgggtaaaacactattacctttattgttaattggctacgcagtgagcatgacagcgttgttcttagtcgccaaatatacacacccaacattaacaacaattttaattccattttgtattatggctgtgatgaacggtgcttcttatcccattgctgtctctaatgcgctatcagcctacccggaagtgagtggtaaagctgctgcattgcaaaatgcgctacaattaggtctatgtagtttagcaagctttattgtctcagcctttattagccaacagccattaattaataccacagcgattatggcactcacggctattccaatggcgctgggttactttattcaacgtaataaatccgttagcaaacacacagttcaggcgacagaataacgccataccctgtttttaggaaaattcttaaaaaaggccatttatataaaatggcctttttattttctagagaaaacctatttacatctctatacttgttcaaacgcttaagcgttttattcatttttctttcggattttgaggcattaaacagataatttgctgattatgtcagattagttctcttaataattttattcattcaatctgtgttgaattcaatattgttttaactctaccaatctgcattatcctttcttgcttcatgcctcaaaacccgcttagtttacgccggagagtatatgagtacatcttgtgtagaagaaggccgaaagacctccaatgatccttatcaacggatcgcatcagagctgctcgctcaagcagacattcatatcaatggttctgaaccttatgatatccaagtgcataataaagatttttataaaagagtattacaacaaggctcattaggtctcggtgaaagctatatggatggttggtgggactgcgaacgtcttgatatattctttcataaagttttacgagcaggtcttgaaaataaattgccaagtaactggcgcgatattttaaaaatagccatggcacgcatttttaatttacaaacacaaaaaagagcgtggatggtgggtaaagagcattacgatttaggtaacgacctctttaccgcaatgttagatccttatatgcaatattcctgtggatattggaaggatgcggatagcttagaagttgctcaacagcacaaactcgaccttatttgccgtaagttagagctaaaaccaggtatgacattgcttgatattggctgtggctggggtggtcttgctgcttatgctgccaaaaactatggcgtttctgttacaggggtgaccatctcagttgaacaacagaaattagcacaagagcgctgtaaaggtcttgatgtcaatatcatcttagaagattaccgtgacttaaacgagcagttcgaccgtatcgtttctgttggtatgttcgagcatgttggcccgaaaaactatgccacttactttgatgtcgctcgtcgtaatatcaaagaagatggattatttttattacataccattggttctaatcacaataaagttaatgtcgatagttggataagtaaatatattttccctaacggttgtttgccgtctattcaaaaaaccgctgaggcaatggaaaataaatttgttatggaagattggcataattttggtgccgattatgacaaaaccttaatggcatggtatgagcgttttttagctagctggcctgaaattgaatctaactatacacctcgttttaaacgcatgtttagctactacttgaatgcttgtgcgggtgctttccgcgccagagacattcaattatggcaaattatgttaagcccgaaaggtagaataggtggattacgcacacctcgctgatttttagctatcaatagaggtaaaaatcccgttttccatagactgaaaaacgggattttttaattctagtcgtctgataacagactatattatttttcgttttcttcttcgtgtgttgcttgaagcttaaccgttaatgcttgttgcgccataacacgctctacggtatcaacaatcgcctgagtctgtggatctaactcaatattaactttatcccccaaacgcttacgacctaacgtcgttctatcgcgagtctcagggatcagatggacacagaaacgattattaaccacatcaccaatagttaaactaataccatcaatgccaataaaacctttatgcaaaatatacttcatcaatgtctgatcaaaaatacgaaaccagatctgtaagttattttctgaagtaataattttcgcaatttcagccgtagtgacaatatgaccagacatcacatgaccaccaatttcatcgccatatttggccgctcgttcaatattaacttctgaaccaaccgttaactcgcccaaattagttaagcgcagcgtctctttcactaaatcgaaactaattttattgccatcgatttttgtgacggttaggcaacaaccattgttagcgatcgaagctcctgtttctaagttattgactaactcggaaggtaattcaatgatatgggtacggaaatcacctttatcttcaatggcaataacacgtccttttccctgaacaatacctgtaaacatctcacatctccttggactgataagcgagtttatcttaattaatttagtgtaatcaggataacataagtgatattacacaaagggatcattattgccttctccccttatgatgtttgccatcaaatataacgtaaaaccacttatttacttatcaaaattctgtggttgaaaaacgtcatatctttcattgataattaaacatttatcattagaatatgtttgcttaaggattattttacgccatattaacatgtgacgttctttcctcccttccgtcttattataatgaataaaggtgtatgcgtgcagaagtatataaaagaagcgcgtagcttacttgctcttggtatccctgttatcatcgctcaattctcccaaactgctatgggagtagttgataccgtgatggcaggtgctgtcaatgccacagaaatgtctgcggttgctgtaggtacgtcgatttggttgccaacgattttattaggtcaaggtatattaatggcattgacccccatcgttgcacaattaaatggttcaggacaacgaaagcatattgctaatcgtacacagcaaggtttttggcttgccacttttttatccatcatggtcattgccattctttataacagccgttttattattgaagcgcaacatgatatcgagcctgagcttgcagaaaaagccattggatttattcatgccattatgtggggggctcctggttgtctctattatcaagtgctaagaagccaatgtgagggattatcaaaaacaaaaccaggcatgatcatcggctttattggattattaattaacattcctgttaactacgcctttatttacggtaaatttggtgccccacaattaggtgggattggttgtggtgtggcaaccgcctctgttttttgggcgatgttcttaatgatgcgctactatgtgcgtcgagcaccaacacaacgggatgttatgcccaaaaaacgcctagtgttacctgaattccacacaataaaacgtattacattgttagggttacctgtagggctagcactattttttgaagtaacactgtttgctgttgtggcattattagtttcaccattaggtgtaacggctgttgcaagtcaccagatagcccttaattttagctcattaatgtttatgttccctctttccttgggaatagctgcaacaattcgtgtgggttataaccttgggcaacgttctacagagcaagctcgtacttcagccattacagcccttgctgtcggattaatgctggcaagttgtaccgctattttctctattatttttagagaaaaaattgctttaatgtataacgataatattgaagtggtgacattagcctctcatcttatgttattcgccgcactttatcagttgtcagattccgtacaggttattggttcaggggtattacggggttataaagatactcgctctatcttttttattacctttatcgcttattgggtaattggtttgccttccggatatctcttgggacgaacggattatattgttgaagcaatggggccggcggggttctggattggttttattttaggtttaaccgcttctgcaattatgatgggaacacgtatttggtggatccagcgtcaatctgatgaggttgtcttattacgctcggagcgttaatacttccattaaagcgttattttttggcaaaggaatgacacaaatatcaacaaatagctttaaatacgagcagttgaatacaaatttgtgtttttcctcttgccagaagcaaatcatctcgctaatattcgtctccgttgtcacccagaataaagaatgcgtccatagctcagttggttagagcaccaccttgacatggtgggggtcggtggttcgagtccacttggacgcaccatttactctgaacaacatttcaatacagtgcgtccatagctcagttggttagagcaccaccttgacatggtgggggtcggtggttcgagtccacttggacgcaccatttctctttcttaattcttgttatatttcgtgttacctcccctacacaacaacaaaatgattacgcaaaatttaattgcgcaacaaaacgcttaaaaaacaagcaatcagagccctattttgatcacatcacttaaatttaccttttttcgattttcttcatggaaattaacctctataatacaaaacataattttgttgaaaggtttcagcgtattgatttacaggcatctttagaaaacagaacaaatgaatcatgatagactataatgtaagatgtctagcaatcttttatacaaaatagtgacaaaatttttatcatgttgttggagccactcacatgttgcgcaacttattagctagaaatgaatgcacttatcgtgtttcgcactgttaagatgattgatataacccaacaacattaatccttattcatccattacaatagaatcattaatagactgccatgaaaaagacaaaaattgtttgcaccatcgggccaaaaaccgaatctgaagaaaaactgactcaattactggacgcaggcatgaacgtaatgcgtctaaacttctctcacggtgactatgaagagcatggcaaccgtatcaaaaacctgcgtaatgtctgcgcaaaaacaggcaaaaaagcagccattttattagatactaaaggacctgagatccgcaccattaaattagaaggtggtaacgatgtctctttagttgcaggtcagacttttacctttacaacagatacttctgttgttggtaataaagatcgcgttgcggtcacttatgacggtttcgcaagagacttaactgtcggcaataccgtattagtcgatgacggccttatcggtatgaaagtcattaaagtcactgatactgaagtggtatgtgaagtactcaacaacggtgatttaggcgaaaataaaggcgttaacttaccaggtgtttctatcggcttaccggcattagcagaaaaagataaacaagatcttatctttggttgcgaacaaggcgttgactttgttgccgcttcttttattcgtaaacgttcagatgttgaagagatgcgtgctcacttaaaagcacacggtggcgaaaacatcatgatcatctctaaaattgaaaaccaagaaggtttaaataactttgacgaaattttagaagcctctgacggtatcatggttgcacgtggtgacttaggtgttgagatccctgttgaagaagttatctttgcacaaaaaatgatgatcgaaaaatgtaacgctgcgcgtaaagtggttatcactgcaacacagatgttagattccatgatcaaaaatccacgccctactcgtgcagaagctggtgacgttgccaatgctattttagatggtactgatgctgttatgctatccggtgaaagtgcgaaaggtaaatatccagtagaagctgtgactattatggcgactatctgtgatcgtactgatcgcatcatgaaatcacgtttagagtcttaccaattaggtgctaaattacgtgtaacagaagctgtttgtcgtggtgctgtagaaatggcggagaaattagatgctcctcttatcgttgtagcaacttatggcggtaaatcagcgcgctctatccgtaaatatttcccaacagcgcctatcttagcattaacaaataatgaagagaccgcacgccaattactgttagtaaaaggtgtaacaacacaattagttaataaaattgcttctactgatgacttctaccgtatcggtaaagatgcagcattatcaagtggcttagcccatgcaggtgatcgtgttgttatggttacaggtgcactggttgatagtggaacgacaaatacttcatcagtacacgttctgtaatactcgattatagctaatttgtaattaaaaaatttaagccatccgttttaacggatggcttttttatcgctacttttttataaaaaacatcacattgaactactgccaaagagattatttctgttgctgactatcatgatctgttttatctattggcactaaataatgcgttgaacgagcacgaggatggataaaaaagtgtcctttcggtgcattatgactcttaatgtggatcatcgatacattggctttattgcctttgcgagagcacgcataaataataaaaggtaaagcaaaaataataataaaactcaccactagcaatgaaacatacgttgtatcactactgccccccggtaaagagctaggcgggaagaatgaaacaacaaaagctaaaatagacacaatcagaccgacaacggccactaataatttaacacctttaccaccgggaatattaaatgcacgtttcttatcagattgcttgcaaaccaaatgcatatagccaataaacagcatgaagtagctacatagataaatcaccactgtcagcgctaaagcaataagaaatgacatattgcccccaccaccggtgttagtcagtaccactatagcaatagtagtaataattagctgagtgatcactaaagctaccggtacaccatttttatttactttagccagtgttggcggaagaataccttgttgtgcagccacaaacattccccgtgaaggcccaacgatccacgacgcaatttcagccaagacgccaagcaataatagtgcagcaataattttaaccgcccaaactaatccgctactaaaatggctgactaaaacactaaaggtttcaaccacccccgcagataagttgatttcgttatgagggatcactgccgcaacagataaaccgccaatagagcttaagcatattgccacaatcattaataaaaacatggcaagcggataatcacggcccggatttttcatttcgttgacgtgagtggctgaggcttcaacgcccatatagcttaaaataaaggccacaaaaaccactaaagtaccaatctgagtaaaatcagggaaaaaggttttactgctgatttctattgctaaaggcgcaccactgaccagataactaatagctaaaagcactaaaatgattgctggtaataatatccccgcgaagaaacctaatttagcaatagtagccgtgtatttagttccgccaaattgagttaaagctaatccccataaaatcactaatgcggcaatcgttttggtgagcggatcggtatttaactcaggccaatcaagaatataagataatgctcctaatacgaaataaagcattggaataaaaccaatcgctatttgtaaataaccaaaagagatcgccgcaaatccccagcgctcccctagcgtattagatacccaagcaaatacgcccccttcttgccatccttcaacggttgccatttcagctgcacataatgcaacaggaataaaccacaacaaaccgcctagtaataagaaaaagactagactaaagccggaagttgcaaaagttggatactcatagaccgccatcaccatggatgcagttatagcaaaaaaacctaataatgtgagctgttttgaggcagaacttgttgcagatgtcgccatgctcattctcctacgtgtatgcaatgaaataatggtgtgcagataatcaaggctggagaaaaagagtctatttctccaacctattaccaaataaaagagcctgtttagctgtggttaaagccaccgccgtcctcttcagataaaggtgtgctgacaggatgtttttcgaaataatcgagagtacgtttcatatcttctatcagtaatgtcgccaaatctaaactcacaccatgacgaacaagaatacgttgaataactaaatcttggcgatcagcaggcatagaataagcgggtacttgccagccacggctacgcaatttatcagcgatgtcatataaggagtagcttaccttagcctcttttttcagtttccacgctaatgcaggtattcctttttgactatcaccactgaagatcatttcaaaaggccctagcttttcaatttctcgagcaaggtattgcgcggtgtgataacaggcattgtggatcttcgcatacccttctctgccaagacgcaagaaattatagtattgagcaataatttgcccaccgggacgtgagaaattaagcgcaaaggttggcatattaccgccaaggtagttcacattaaaaataagctcttccggtaagtctttggcttcacgccatactacccaaccagagcccaatggcgctaaaccaaacttatggcctgatgagttaatggatttaacacgcggtaaacggaaatcccattctaaatcaggtgcacagaaaggcgctaaaaagccaccactcgcaccatcaacatgaataggaatatcaagtccggtctctttttgtagttggtcgagtgcatcatgtaccgcttttactggctcataagtacaggtgaaggtcacccctaatgttggcactacaccgatagtattttcatcaacacgtttaatgacctcttcaggactcatcatcaagcgatcaccttcaagcgggatctctctgagttcaacgtcaaaataacgggcaaatttatgccaacagacttgaactggcccacaaataagattaggtttatctgtcgcttttccagcagcaaggcgttttttacgccattgccattttaatgcaagtccccccagcattgccgcttcagaggagccaatggttgaacaacctagggtattgagtggatcgggtgagtgccataaatcagcaagcatatgaacacaacggttttcaatttcggccgtttgtggatattcatctttatctatcatgttcttatcgatagataaattcatcaaatcacggatctcatcatctacccaggtttgacaaaatgtggccagattttgtcttgaattgccatctagcatcagctcatcccttacagcatcaaaaacatgacgaggatggctctcttgttgcggaaaatgtgttttcggtaaggattgtgataaatcaaccgatgcataaacatcatcgagtgagctataacttggcgtttttttattcatcttgaaattacctttactaattattattacattagtgactaaatgattttaaatacctactttaaaagatagtctaataattccagtaatgaaaaattttttatattttatgaaaacaacgagagtatatttatcaaatcagctttaacactccacaagaaataacaactcattgattttaaatgatattaataatattccacttgcttttatgttaatttatttatgtacatttagaataaaatatttgtactataataaaacttgaattatgagaaataacctttatagcattaagtaataacacttaatttaaaatataaatgtaaatgaaattttaaatctaagttttaaaattaataattatttaatttagatttgatttaataaggaacaaaaaaagatgatagaaaataaccgacaccccttcgcttgcacaacacttgcgattactgacaagaaaaaacgtgtttatcatggtcggacaatggagttttcttctgatgagccaacgtctatcttagcttattatccacaaggtcatacttttcagcaaaatgcccctgatggaacccccggattaaagtacagcgttaaatatccttttatggctattaccgctcctattaacttatcgggtaccaaagatgtacttgaaggtgtaaatagtcagggactctcttttagcttaaatatgctacctaactctaagttagatgatctcgatccccaatattacgcaagctctgttcctattgctgctattggtgagtgggcattaggacaatatgcgacggttaaagagttaaaagagattatcccccaaacccatttttggtcacaaaagctattattgttacgtaacttaccaagccctttccattacgcattttatgataaaaccggtgattgtattgttgtcgaagtctctgatggtaaattacatatttatgataatcctacctattgcatgaccaatggccctattttcccgtggcatttaactaatttaaacaactacactcatctttctaatatcaacgtttccagtagcacattaggtcgtattaaaatcaaccaacctgatagtggtattgcattagcaacattacctagctcagatacttctgtagatagatttattcgtgcagtttattattcaacctattaccacaaagtttctgatcctgataaacagcttattgagcttgcccatatcatgaatcgcttcgatcgccctaaagatgcaaccattgatccactattaggtaatgatacgctaactaaacttcatactagtgaattttctgtctggacggcgctaactgatttagaacgggggatctttttcttcagaggctacaacaacttaaactttcaaaagttcacacttgagtcatttaaaaatgaaagtagcgcggtttttattaaggtcaatttggaagaggcattgtaaaatgctttagatagaaactaaaatagtttagcacggagaaaatttttttatatcagacttttacgaataaaaatcttttgtgaaataacacgcattttttatactggttatttgcttgttgtaggttatttttcatattgtcatataaagagtaagtagttatagctagttataaataaattctgtattttcttataactgtgccatacttactagtggcttcatacaaaatgctacttgttcctttaaacaaactaataatagaggttgtcacaatgaaagcaaaaattgtactaggtgcggtaattctggcttcaggcctattagcaggttgttcttctagcaacaacgcacaattagaccaaatctcttctgatgtaaaccgtttaaatacgcaagttcaacaactaagtagtgatgttcaatcagctaacgctcaagcaaaagccgcttatgatgaagcagctcgtgctaatcagcgtctagataaccaagtaactacttataaaaaataatttgactgcttaataagctgaaaacgttaagtcagctttaattaataataaaaagcagatacctatgaagtatctgctttttttcatcattgaatatctatcatcaatatgcggttacatcgaccggtatacctgaacgacgaatagtttctgcatccacttttgctttatccactttgccactttcataccaagccgtaaattgtttagtaaacgttaggggcatcgtctggggatcgtcatcttcattttgtgagagtggttggtgcacttcaataaattgcttaccatctgcagtctcagtaaatttaattggtttattgatcacttgaacccgactgcctttgggtaccacattaaacagtgtttcaatatcatcaggacgtaatctaatacagccagaactcactcttaagccaataccaaaatcggcattagtaccatgaataagatactcaccacgactgtgtgctaatcttaacgcatatgcacccattggattatctggccctgctggtaccactgccggtaacgtgatccccttagccgcataatttttacgaatattggctgtcggcgtccaagtcggatctttaatcaattgagaaacagatgtcaccatttcaggcgtttcccgccctaattggccaataccgataggatagacatcaacggttcccccttctttgggatagtaatagaggcgcaattctgccagattaatgacaatacctttacgcacggtatcaggtaagatcatctgtaagggaatttgtagtgttttgcccgcttcgggtaatagaggatcaatacctgggttggcttccatcatatttagcaaacccacttgatattgtgcagcgatcgtttctaaagaacgtttatcatcaggaacggtgtaagaaacattttccccaatgatacgtgaaccatccgtaggtagcaggtattcatgtgcataagttaagtgactgctcatccctaacagcgatgcacccaataaggttaaccatttcttcattgttgatcccgtgtgttagcaataaaataaactgactattatcatgataacattctcatcgttatgattatcatataataagtcagtttagaacattaatatgggatcgggtaacatttatgctacagtgtattccgaaaagcgtttcattaaccgtgttaccatagcgtgtaacccttgagtacgagatggcgtcaaatgactttccagtgctaatgtcgagaaatagtggttaacatcagtggcgagagcttgctctaccgttttaccttgaaaaagaataatcactaatgccactaatcctttaacaatacctgcatcgctatcaccggctaagatcagctgtttatgctcatctaattcaaccgctatccagacttggctctgacaaccttcaataaaattagccgccgttctttgttcatctgttaatggtggtaagcgttctcctagctccatcatatagagatagcgttgctcccaatcctgacaacgagaaaaattgcgtaataattttgcttcatcaggcaaagccgcaattgccatgaataacctcttttttaattgttagcctaatagtttttcaatgcgtaacaacgcattaaccagtgcatcaatatccgctttattattgtataatcccaacgaagcgcgacacatggcaggaacctgataatagtccataattggcatcgcacagtgatgacccgtacgaatagcaataccatagttatcaagaaaagttcccacatcataagcgtgatgcttacctaaattaaatgctatcacaccttgacgcgcttcattaccataaagcgttaatgattttactttggttaattgttgttgtgcatattgcattaagctattttcatatgcagcaatcttatccataccaaattgagcaagatattccaatgctgcccctaagccaatgataccgataatattaggcgttccagcttcaaatcgccacggcgcatccgcgtaggtaatatcaccattgatatgcacatgttttatcatagcgccccccccttcccatggaggtaattcatcaagtagcgcttttttgccatatagcaaaccaatccctgtcggaccataaagtttatggccactacatacaaaaaaatcacaatctaacgcactaacattgatagcttgatgcatcgcactttgtgccccatcaactaaaatatgtaactcacccccttgctgagccgaatactctctagcttggcaaataatttcagcaataggattgacggttcccagtacattagactgatgagtgatcgccagtaacttagttctgttatcaattaattggggtaattgcgctaaatcgagttgcccattagcaagcagaggaataacacggacatgaaaaccatactgttttgctaacatataccacggcactatattcgcgtggtgttccatttcagtaatgataatgttatcaccatcatttaggaaacgatggctataactgtaagcgactaaattgatcccttctgtcgttccttttacaaaaacgatttcttcttcgctctttgcacctaagaaatgtgctgcttgcttacgaacattctccactaaggtggtggcgtttgcacttaatgtgtgaatgccgcggtgaaccgcggcatattgtgttaaggcaaactgtttttcacgctccatgacacaagcgggtttttgcgcacttgcggcactgtcgagatagactaaaggtttttctttcacttgctgggaaagaataggaaagtcatcccgcgctttttcaatggaatgtgtcatcatgcctttttatacctctgataagcgttgatttattctctctagaacatgagttttgatcacactattttctaatgattctgttaattcggcagcaaatgcatgaatgatcattttgcgagcttcacttaacgcaatacctcgtgaacgtagataaaatagttgctcatcatcaatacgcccaaccgttgcaccatgactacatttcacatcatcagcatagatctcaagttgtggcttagtatcaatttgtgctttatcacctaataacaagttgttattggtcatttgaccatctgttttcagcgcttgaggggtgactgtgatcatgccattaaatacggctttccctgcatccattgcaatacttttatgtaattgacggcttaggcaatttttctcaccatgcacgagccaagtacgagtatcggcaatttcgttcgctttgggtaataccacactattcattgatagctcactgttctcacccgtcagtgcagcgctagtatgatgacgactcagtttattccccaacaagaatgcataactattaacacgagcatctcgtccaatgcttaaatcgttatgggcaaaatgttggctaatgccattttcaaaaccaagtttaatatggttgaacgaggcattatcaccaatagtggcggttaatctcgccccggtaaaatgacggttttcaccatcactactaatatagtgttcaatcacttgcatctgagcattagcgccaacatcaagatggaaacgatagttagcactgttaacttcttgccctgcatgaccttgtgtaatattaaggatataaagcggtttatctgccactacgccttttttcaaggtaatgaatagcggctgttgcgctaaactttcaactaaatgcaagaacacttcaccattaatggcttgcggtaattcactttggttatccagtaatgtcacttggtatggaccaaaatcttgactactttcagccggtgaaaatgcaccattaaccatcacgatacggtagcaatcaaatgagagcgcccgttgctcaattaaatcttgtacctcaaaaggtggcaacatttgatattgctgactgagcgtctcatctaatggcgtataatgccaatcttcgtgtcgataagctggaaaacccactttttccacttgtagccagtgattacgtgcatttaaattatcttcccctttacgctgttgatatagcgcagagaattgttttaatgcctgttgattacgctgttctacttgatgctgtttttcacgtttctcattgagggtcaataagccagccataaccttgttcctccaatttttgtgctaatgaaaaatcacctgatttaatgatttttccttggtaaagcacatgcacataatcaggtttaatataatcaaggatacgttgatagtgagtcaccacgataaaggcgcgtttaccatcacgtaagctattgacaccattagcgacaatttttaacgcatcgatatcaagtcctgagtcggtttcatctaagatacacagttcaggttcaagggcagccatttgcaaaatatcgttacgttttttctcaccaccagaaaaacctacgttaacagaacgagttaacaaatcttgaggcatatccaatagtttgattttatcttcaataaaatcttcaaaatcaaagcgatctaacggctcttggcctcgatattctcttaccgcattgactgaggattgtaagaaaaactggttactgacaccggggatctctactgggtattgaaatgccataaagataccttcacccgctcgctcttcaggctctaattccagtagatctttgtttttaaaagtcacactaccttcatcaacttcatactcttcgcgacctgctaaggttgcggataatgtacttttacctgaaccgtttggccccatgatagcgtgcacttcgccggcacgtacttgcaaatctaatcctttaagaatttcattgccttcaacactgacatgtaaatttttaatatctaacataatatatgccttcggtatttttatacccagaatttggttaatggttaaccaacgctatgttctaagctgattgctaataatttttgtgcttctacagcaaattccagcggtaattctgagaacacgtccttacaaaatccattgacaatcattgagattgcatcgtcttcacttaatccacgttgacggcagtaaaataactgatcttcaccaatacgtgacgttgtcgcttcatgctctaattgtgctgagttattcatgacttcaacataagggaaggtgtgagcaccacactctgtgccaattaacattgagtcacattgtgtgtagttacgtgcattctgcgcaccaggtaacactttcaccaaaccgcgataactattttgacttttacccgcagaaatacccttagaaataatagttgatttggtatttttaccgatgtggatcatcttggttcccgtgtcagcttgttggttaccattggtcagtgccactgagaaaaattcagccgttgaattatctccttttaagataacacttgggtatttccaagtgatcgctgaacctgtttcagattgagtccacgacattttagcgttctcaccttcacaaagggcacgcttagtgacgaagttaagaattccgccttcgctatcaccgccagagaaccagttttgtaccgtggaatatttcacttcggcatctttatgaatgataacttcaacaacggcagcatgcagctgatagctatcacgtacaggtgctgaacacccttcgatgtaactgacgtaacttccttcatccgcaattaaaatcgtacgttcaaattggcctgtttgtgccgcattaatacgaaaataggtggataattccatagggcagcgaacacctttaggaatataaacaaaggtaccatcagaagcgaccgccgcattaagtgccgcaaaatagttatcgtggctagaaacaactgtacctaaatattggcgtactaattcgggatattcttgaatcgcttcaccgaaggagcagaaaataacaccatgtttagctagctcttcacgataagtggtagaaaccgatactgagtcaaaaatagcatctacagccactgactgcccttctcttactggcacgcctaactgattaaatgcgtcttcaacttctttagttaaataatcttgggtttcttgtgttgagacagcttcattgttaccactagcacaactgccattggcacaacaagcaccgcaagatggcgctgaataataactataatcttgataattcagcgatggataatctgcttttagccaatgaggctcttccatctctagccaatgacgataagcatcaagacgaaactctagcatccactctggctcatttcttttagctgaaatagctcgcacaaccgcttcattcaaccctttatctaacgtatcggttgagatatcggtatagaacccttctttatagtgatgatcactgagccagccttgaacttcatcaccaatttcaacattgctctgagacataatctgacttcactatgttataccccaaagctctcaccacatccgcagacgttctgagctttaggattattaaatttaaacatctgattaagtccttcacggacataatcaacaactaaaccatcaatgaatggcatggcttttaatgcaacgaataacttggcaccattatgttcatagacaagatcgtcctctgaggggcctgcagcaagctcaataacataaccatagcccgtacaacctgatggcttaatacttaaggaaagtccctgactttcagggtttttctccactaattggcaaatatgtttcgctgcactatcagtcagcacaatgccttgccaagcagtatcatttagagaaaaagtttcaacattgtttgtcattactgacctcatttcgaaaggagattaatatctttcctgactctaatggtaatgataacccttatcacttcaaccctgtcttttgaaaggatattataaaatcgtttaaaaattgctctttttttgctttttaattgttaaatatagcgcttaataaattgaaatgtaacaatttttatcttttttcattacaaaaataaaacttttttaaattcctttatttcgcacaatacgcataaaagttgcaaagcaaatacattttatacctttgtcactgaaatgtagagaaaaagcataaaaaatcaacaattgataatcgcaaaatattttctttttatgcttatactgataggtaagatagcaccacttttgtgataacttcttattgtattgtgtgcttttatgacttattgattgatactaattgaattcacatacctattagtacaatcaataacttcttgattattattacttttattttcagcaataaattgtaattgccatacacgatttgtgttagtatccgcaattaataccccttcatagctcactttttgattagacaactttccttcaaagaaaatttgtcgagctggcatttctgacactgtgaaaggctttattgttgttgaagtttctttcataccatcaatagtggaaatattatcaacgataccctgtgctcctgaatcaatatcataactcatcatatcgtcaagtttaaaataaactaaacgaacttctgataactggcatactggtttggcttgataaactaacatctgtgatgtgacatcttggacatgatcaggtaataattgaaaatagtgttctgtatcatctctatttaatgagaatgaagttggatacgcgatattaaaccccgacatagtacgtacaggataatttattatctcttcactcttattgtgagttgattcgttatcacatgctgtaagtaataaactaccgattaaaataaaaacgcttttataatttagaatggttgatgtcattttttcttactattaataataatgaagataataattatcattaaaatttaaacttaaataaagataattttttcacatgacctcatttcaataaataaaaaacgcctaaagtgaaataataaccttaggcgtctattattaattaacgaattaaacaataaccgcagttgttaaacgtgaaatacaaactttacggtcagcgtcatcaaaaatttctattgaccatacttgatgtgtacgacctaaatgaataggtttacagacaccttttacaaccccttcttttactgctcgcatatggttggcattgatttctaaacccaccactttttgttcaccttttgtgcataaatagccagcaattgaccctaaggtttcagctaataccacagaggccccaccatgtaataaaccaaaaggctgtttagtacgctgatctactggcatggtgccttcaagatagtcctcacccagtgcggtgagttctataccaaggtgccccaccatattatttgggctaatatgattaagttgtcctaatgttgtttttcgtttccatatcattgcataatctccaaaagcgcctgtaatggatgttttaactcaatattatcaatacgttttacttggctacgacaagaatatccggtactcaagcaacgtgctgtagggagtgttttcaatgcatttccccatgacagttgataaattcccaatgaatttttatagttattcacttcatgcccataagtgcccgccataccacagcaccccgtagttaccacttcaagtggttgaccataacgttggaatatcgcttgccactgttgcatactttgcggtaatgccgttgactcagtacaatgactaaaaagataccatttttcagcatcttcgcagatctcaattggctcactgactaactgatttagccactcatgaaccagttgaaccttaaagttaccgcgtttatcccctaatatctcccgatattcatcgcggtagcaaagaactaaagcggggtcgactcctaccattggaatggacaactgtgcaactcgattaagcatcgttgctgttttttgtgcagttttactaaattgctgtaaaaagcccttaatatgctgtgcttttccgttaggtgaaaaaggcaatagcacaggtttaaaaccaattttttcaatcaacttaataaagtcagcaactactttagcatcgtaataactggtaaatggatcttgtaccacgataacataatggcttcgttgcttttctgataactgctctaactcttccaaggtcatcgttaacgcgctatgtccagctaactgctgctttaatgtcggagatgacaatagaggcagatctaccataccaatagtacgtttactcaacgattgcaccaatggttgcttaataaagaaattaaacagacttggtacttttgccattaacggtgtggtgagttcgacatttgccacaatatgatcttttagcggacgtagatagcgttgatgatataactgagtaaatttggctctaaatgatggcacgtcaattttaatcgggcattgtgtagagcacgctttacaggctaaacaaccattcattgctattttaacctcatgagagaaatcatattctccacgtttagctttccatgtattgcgtgttttttcaatcagtccccgtaagctaggtttgttatttgtaagacttgtttctaactgctgagggcttactccttgctctgtaagtagacgtaaccactctctgactaatgtcgctctgcctttaggtgaatgaatacgttgtccagttattttcatagaaggacacattggacttttaacatcaaagttaaaacataatccattaccattacactctaatgcaccgcgaaaatcttcgcgaaccgatacaggaatggtgcgatcaaatgtgccgcgtttaatagcatcgacctgtttcattggcgcctcaacctcgagaggaggacatattttccctgggttaagtctatttcgaggatcgaacaccgtttttatttgacgtaattcgtgataaagggtttcgccaaagaattctggactatattgcgctctaaagccttttccatgctccccccatagtaagccaccatatttcgccgttaatgcaacaatttcatcagaaatggttttcatgagttgttcttgttgcggatcacacatatctaaagcaggtctcacatgcaatacgccagcatcaacatgaccaaacataccgtaattgagctgataactatcaagtaatgccctaaattcagtaatataatccgctaaatgctctggtggcacacaagtatcttcaacaaaaggaatgggtttagcatgccctttagcattacctaatagccctactgcttttttacgcatggcataaatacggttaatatcggcgagattatcacatacctgataaccgataacgcccccttcgccattcttcatcagcttatctaagcgctgacataaatcctccacttgtgaggcaatcagtgttttatcatcaccggcaaactcaacaatatttagcccttgcatatctttatcgggcacatccgtaatcaatgcattaacggaatgccagacaatatcttctcgagcaaggtttaatactttggagtcaacagtttcaacagaaagcgcctttgcttttactaaaaacggcgcgttacgcaatgcggaatcaaatgagtcatacttcacattcactaaactgcgctgctttggaatgggggtaatatcgagtgttgcctcggtaataaaggccaaagtcccttctgagccggttagaatacgcgtaagatcaaaatgcttcatatcatcgctaaacacatggcgtaaatcatagcccgttaaaaagcgattcaatttaggaaatttttcgagaataagctgacgttgtgctttgcaacgggataataccgtttgatatatccgaccaacagcagaatcttctttcgcaatagtttcagctaaagcgctgtccatcgcgcgagtttcaagcaattctccgcctagtaaaacggctctgacgcctaatacatgatcggaggttttgccatataccatagagccttgccctgaagcatcggtattgatcattccccctaatgtcgcacgattactggtagacagttctggcgcaaaaaagaaaccatagggttttaaaaacagattaagttcatcttttatcacaccggcttctacctttacccatcgctgttctgggtttatctcaataatacgtttcatataacgagataaatccaccacgataccctcggttaacgcttgaccattagtgccggttccgccacctcttggtgtcaaagagagggaatgaaaacgaggttcatccactaaacgtgctacaatagtcacatccgctgtagaacgaggaaaaataaccgcctgtggtagcaactgataaatactgttatctgttgccatagtgagtctatcggcataagtgctcgatatatcacctgtaaaaccattttgtcggagtgtatttaaaaattcggttgtgagttcactgacttgcggtgcttgcgatatacgtgggatcatttgttatagctctttaatctaatttatccacattgctttattaaaactatctcaatgtatgccaagaggtgcaataatttgaatttgcactttcagaccgatacctgttcaccttatcatacaattctggcaaattgcgtagtgacataaacaacatgatatttgccatgtttattcatctgcttttagcattttattcgtgtagggatttaaaatcatggaaaaaccgcagatccatacagatatacccaaaattttattcaccgttctttttatttctttttttattatcggtagtttttggatcctgaatccttttatcgttggttttatttgggctggcatgatagtggttgccacttggcctttactcattattttagaaaaacgagtaaaatatcgctggctatcaaccatgatcatgatgattttaatattactgattttcgtcattccgattattttgttaattagtagtgttattgacaacagtgctccattgattgaactagcaaaatcaccttcagatattcaaccaccacaactactatggttaaaagagatccccatggttggtaatacgctctatgaaacttggcactctattctcgtttctggtggtaatgccttaatggcgaagatccaaccctatattggacaagcagcaaattggttctttgcacaagccttaaatattggccgttttgcgcttcacttagttgtcatgttacttttttcaggattactctttttacaaggtgaaaatgttgttgcttggttacgtcattttgctgtgcgtcttgccggacaacggggtgatgcagccattttattagcctccatgtcaattcgcgcagtggcgctgggtgtggtgttaactgcgctgatccaagccgttattggtggtattggcttaggtatttcgggtgtgccttatgccacagtattaacggtattgatgtttatttgctgccttgcgcaattaggacctttgttcgttctggttccttctattctatggctattttggaccggtgatactacatggggtatcgtcatgatcatttggggtgggattgtggcgacgatggatggtgtactacgtccattcctcatcaaaatgggagctgacctacctatggtactgattttgaccggtgttatcggtggtattttaacactcggtatgattggtctgtttattggccctgttgtattagccgtagcacacagtttattgaatgcgtggatcaatgaagttcctaaacccgatccagatttaacagaaactgtagaatttatgaataaaaactttatagaaaaagagtaaataatataaaagcatgtaagtatcaacacttacatgctttataagtattacttaaaactttaataaagattatcaatttatgagtattttattatttttatatcttgaaatttacaatttgaaacaattcttatttttttaaacctgtttgctaccagcgagttatattcacttcttaatatcctaatatttttttgattgagataattcttagagaataattaactcatttctcttaatataaatctcatcgaaacgaatgtttcatttaattaatggttttgcctattttattaatagattaaaaggcgagaccaaagtatataaaatattgctgtgtgtagtctttgcctgtcagcccatgataggctttttttttatctattatttataaatagtataaaaaaagctcacattattttgtgagcttttaattattcaataataatataattattgttgtgctaatttcacccaggttttaataacggtatctgggtttaaagataagctatcaataccctcttccattaaccattgtgcaaaatcttcatggtcagaagggccctgtccgcagatcccgacatatttaccttgacgtttcgctgattgaattgccatagataatagcgcttttaccgcatcattacgttcatcaaacagtgatgagacgacaccagaatcacgatctaagcccaatgttaactgagtcatatcattagagccgatagagaaaccatcaaaatgagccaagaattgatcggctaataaagcattggatggaatttcacacatcataatcacttttaagccattctcaccacgttttaaaccattacgtgctaactcatctatcacttcttctgcttggcgcaccgtacgtacaaatgggatcatcacttccacgttagttaatcccatctcattacgcacacgtttcactgcttcacactcgagtgcaaaacaacgacggaaatcatccgatacgtaacgacccgcaccacggaaacctaacatagggttttcttcatcaggctcatagcgatcgccaccgactaagtttgcatactcatttgatttaaaatcagacaagcgaacaatgacacgttttggccagaatgctgcagcgagtgttgcgataccttcggttaatttaccaatataatattcaacaggtgatgcataacccgccatcatttcatcaatttcagcttttagtgcatctgtttgatcttcgtattcgagtaaagcgcgaggatgcacaccaatcatacggttgataataaactctaaacgcgcaaggcctaccccatcatttggtaacccagcaaagtcaaaggcgcgatcaggattaccgacgttcatcatgatttttaagccaagttctggcatgttatcgattgcggagctttgaatagaaaaatcgagtttcccatcataaacaaatccggtatccccttcagcacaagagacggtgaccacttgcccttcgctaatacactccgtcgcatcgccacaacctaccactgctggaatacctaattcacgagcaataattgccgcatgacatgttcttccaccacgattagtcacaatcgcagaggcttttttcatgataggctcccaatcaggatctgtcatatcggtgaccaacacatcacccgcctctattctatccatctcacttaagttatggataaccttaaccgtaccactaccaatacgatgaccaattgcacgaccttctacaatcacagtgcctgtttcatttaactgatagcgttccataacttgttggttagaacgaactgtttctggacgcgcttgaacaatatatagacgaccattatgaccatctttagcccactcgatatccattggacgtccataatgttgttcaatcaataccgcttgttttgctagctcttgcacttcatcatcagttaaagagaaacgattgcgcaatgcttctggcgtatcttcaatacggacttgtttaccatgctcaatgctatcggcataaaccatttggatctttttagaccctaggttacggcgcacaattgccggtaaacctttcgccaaagttggtttatgaacatagaattcatctgggttaactgccccctgaaccaccatttcccctaaaccataagcagaggtaataaagactacttgatcaaagcctgattcagtatcaatagtaaacatcacccctgatgaagctaaatcagagcgaaccatacgttggacacctgcagataaagcaacaccgcggtgatcgtagccttggtgaacacgataagaaattgcgcgatcattaaacagtgaagcaaacacgtgtttaatcgcaactaaaattgcatcgataccttgaacgtttaaaaatgtctcttgttggccggcaaaagaagcatcaggcatatcttcagcggttgctgatgatcgtactgcaaatgaggcttcagattcaccttcacttaaggtctgataagcatcacgaatatctttctcaaactgaggggtaaaaggtgtatcaatcacccattggcgaatttggttacccgcttgtgctaattgattaacatcatcaacatcaatactatcgagcagctcataaatacgctgattaataccactttgttccagaaaatcattaaacgcttgcgctgtggtggcaaatccattaggaacagacacacccagttccgcaagattagtgatcatttcaccgagggaagcatttttcccaccaacacgatcaacgtcattcatacccaattggttataccaaagtacattgcacggggtgaggctattgctggacattgagaacaatccttttttaaacaaatgagagagagaaaaaaaagaaaaacccgctgtcaaaacgacaacataaataagcgtatcacaatgttatggagaatatagaaaggtgaatcgatcaaccagaaaactttatttttttatcctttataatcactaaaaatactatagataatattgtctgaattgctaattcagctaaaaaaaaggtgagaggaatgatattaagtttgaattcaattaactgtgataataataaacttgttgatagaactgttttttttatctctgacggcaccgctattaccgcagaagtcttaggccatgcggtactctcacaattcccattaaaaatgaaaagctataccttaccttttgtatcttctgtagaaagagcggaagaaataaaaaataagattaatgaaatttataaaaaaagtggcgccaagcctctggttttctactctattattagtcctgacgtaaaacgaataataaatagtagtgaaggattctgtcaggatattgtgcagtcattagttctccccttagaaaaagaaattggcgttcaagcgctacctcaattaaataaaacgcacggtttaacagaaaaaaatctcagcaaatatgatgctcgaattgctgctattgaatacactttatctcatgatgatgggatctctttacgcaatctcgaccaagcgcaagtgatcttaatcggtgtctcacgctgcggtaaaacccctaccagtttatatttagcgatgcaatttggcattcaagcggctaattacccttttactgctgatgatatggattttttaaaattgcctcctgaattaaaagagtatcaacataaattgtttggcttaaccattgccccagaacgccttgctgctatccgtagcgaacgtcgtgaaaacagtcgttatgcatctattcgtcaatgtcgtattgaattagcggaagttgaagcgctatttaggaaaaataacattccttacctaaatacgacaaactactctgttgaagaaatttccactaaggtaattgattctatgggattagccagaagaatgttctagagacagtaagttattttttatttatttttcaccaataacagtgttgaaattagctgaatttcgtttattgtgatcttaatcactgggtagacttaccctgtatttttattgagataaattatgttaaaaacagacgaattacggacaaaggctttagccagcctagtaacgccggaaacgttagctaatgagttacccatctcacaagagattatcagtaatatcacttctgcccgtcaacgcattgaagctattctcactggtgaagataaacgactattagttattattggcccttgctctatacatgatcccaaggcggctaaagagtacgcaacaaaactaaatcaacaaaaagcgcgttttcatgaccgtctagaaatcgtgatgagaacctattttgaaaaaccgcgtaccgttattggttggaaaggccttatttctgatcctttccttgataactcttgtaatgttaatgaaggcattcgtattgcaaggaaactgctaattgagatcaacgcattaggactccccacagccactgaatttcttgatatggtcacggggcaatatattgcagatttaatcagctggggagcaatcggggcaagaacaacagagagtcaagttcaccgtgaaatggcctccgccctctcttgccctgtgggatttaaaaatggcactgacggtaatatacgcattgcgatagatgccattcgtgccgctcgtgccagtcacacctttttatcacctgataaaacgggacgtatgacaatttaccaaaccagtggaaatccctacggtcatattattatgcgtggtggtaaaaagcctaattatcatgccagtgatgtagcagatgctgttgatgcactgaaacaacttgatttacctgaacacttggtcatcgattttagccatggtaattgtgaaaaaattcatcgtcgccaacttgaagttgcacgcaatgtcgctcaacaaattacggatggttcacaagctattgtcggtgttatggcagaaagctttttacaagagggatcacagaaagtcacagcagataaggtgctgacctatggacaatctatcactgatccttgtctcagttgggaagataccgaacaattactggaattattagctcaagcggttgaaagtcgatttaaataatatcgccaaaaaggagagttttacctctcctttttaacttacacaaaaagtcgttatccatcttcattaagattaagctttatcttctcccacgctaatcaactgtatgatttttattctaacaccctatttttgttgttcttttgttactaatcatcttaaatttagacgtttacgttaaaaaaagcttgtctaaaatattctgataacgataatgattatcataatcataacctctatcagtattgctattgaaatgaataaaaatgttcataatttaaacgattcatcgataacacgtgaaacaagctccccagtcattcaatctataaatagcatagaattactgggtaaatcgggcgtggtttatattcaacataacggagagttgtatcagttacgccaaacaaaaacaggaaaacttatcctaacaaaataattatttaatcccttttcgcaagccacctattttgctaggcagccagctaattcactccatatacaaggacttttatggatattaatggtatgtctatgctgaaaagaaatttcaaatactccacattagctacagcaatttgtctgttatacgcgccgactacttttgctcatattgaaaaagtagagacagatacattgactgttattgggcaacaagacaatcaaataacggattttcaatctgtcgtcgatacccgttcagcacaagctcaaaccgcatctaccacgggacaattgttaaaacaaatcccggggatcaccgtatcagggacggggatcaccaatggtggcaatattatgatgcgtggttacgatcaaagaggtgtcaaaatctttgtggatggtattcatcaacctattgataatactatgaacaagcttggtggcctttttattgaaccttcacttatttcgcgcgttaaagtcaaacatggtggctcttcggttaaacatggaagtggcgcgctaggtggcgttgtttcgttctcaactctccatccaaatgagttattagacgccaataaaaaccttggtgctaaattatttagctcattctcttctgcggataaacatttttcttatggtggtgtgatcgcaggtagacatcagttagtggaagggttattggcttatagccaaagagagcgtggcccgatacgtattgctgatgactcaatattaaataaccacgaacgtatcaaaaattattttgcaaaagcctatgtttaccctacagaggaacaaaccgttattttttctgcccgtcaatataataatgcaggagagcaaagagaagttttaaatcgaatgggagggtttggaaaaagagacagtaataatatgtatcgagccaccaaacaaaatgatatctcactcacctatcatttaaatccaaataattatgattggctcgatctgagcactcaactttattattctcagtttaaaattgcgcatacgtttctgacggatacacgcaaagaaatatatccagacatagaaagtgtgctaggtaattctgaaaaacgtacccaatatacctatggtatgaaagtagaaaacgcctttaatttaaattactttcaagataggttgactcaatctgtgattatcggcattgatgctgaaaaacagaagatggtatcgaataataaggctaaaaatttccctttatcacatatggataatgcctcaggttgggttcataacacgttcaatacccctctattacccattactttaattgcgggtcttcgttacaactattatcaaaatgtccctgataacagtaaaactttagattactacaaagacttaaataaaaaaggagacatgacctccgccgacaaatatcaagaaacatatcaaaatatttctaaaaatattgcgttacgtctcacactgaccaaatggttacagatctattcttcttattctgttgcctttagggcgccgactttaagcgaaatgtataatgactcagtacatttcactataatttccccttttaataagaaaagctatgatgctcgttgggttccaaattccacattagaaccagagacgaatagaacatgggaacatggtatcaatttacaaaaaaatgcgttgatttttaccaatgaccagataaacattaaagcttcatattacagcactgaatcgattgaccacattacttatcaacagtggtatcatagtcgtaagcctatccaattaaaaaatagtcatattgcgttatctcccattaaagatgctcgtgaacctttattatttcaatcagttaacttgcctaaagcgcttattcacggctttgatttaagattgctatattctcatccatacatcgctatgggggtaaattacaatcaaactaaaaccttggaactgtcgtctctagagactatttcaatggtgcgccctgaaacattaaccgcttttataaatgtacccattatcaaaacaccattttctgttgcttggtcaggaaagtttgccggtccaacggccaaaaaaggcacacataaataccctggttcagaggaagtgactactcgattaaaagaagatcttcagcaataccctggctatggtgtgcatagttttgcagtcaactatcaatccaataataaagatatacaagcctcattggtactcgataatgcattcaacaaagtgtattactcaacggtaggtgtgcctcaagaagctagaaatatcaaaatgtctgtcagttatcgctggtaaacaataaaaagagcaatgatttttatcataacgggctgttgagtttagcagcccattttaataacggagatcgacctgtatgtctcaatcatcgcgatgcataaaggtgagtgttttagttgttgcaacagcgattagcagtgcattcgctgaaaataaaaatcaaatctatggagaaaaaaatagcggggagagaaacacacaaataataacggtttatgcaacaggtaacgagcgagatagctttacattaccaatgatgtcgaccgtcataaaaaataacagtgctttgacagaaacggctggaagtgccacggagttgttgcgtcatataccgggcatttcaatatcaggagctggccgcacaaacggtgaaactatcagtatgcgtggctacagtagtaacggtgttttgacactagtagatggcatacgccaaggtactgatacaggtcatattgacagtatttttgtcgatcctctactcattaaacaagttgaagtggttcgtggcccttcagcacttttatatggaagcggtgccctcggtggggttgtggcatatgataccgttgatgccagcgacttgcttgcaaaaaatgaacatggtggtgtgcgtgttacagcccttggtaatacggcacaacagagtcaaggatttggcattaccgcttttggtcaacaagacaatttcgatggattactcgccctctccgctcgtgataaaggtacaactcgctatggaggcggttatcgtgcgcaaaacgatgaaacaatcattaacttattatctaaaggacgttggtttattgatgatagcaatacgttaagtggccaattacgctattatcataacaacgcacaacagcctaaggatccacaactcgccaataacccaacaccggctaatgtagcgacaaatcgtactacaacacaaaaagatgcacagttaacctatcaatatcatcctagtgatatgtcatggattaacctaaaaacacaagcctattacagcgaggtagatattaatgcgaaaacacaacaaaaaggatttgaaggtagagagcaaaaaacctatggcattaaaattgaaaatcgcactcaattagccacctacccctttgctgctcacgctttaacttatggcggtgagatctataagcaaaagcaatcacccagtgcaaatgccgaaagcttccctaaagcagatattcgttttatgtcaggctggttacaagatgaaatgactttacgtgatgtacccatttcattcatcgtcggtacaaggtttgataaatatagcagtcaaaatgatcgttatgatgacatcagcgctgataaatggtcatcaaaaggagccgttagtattacacccacagattggttaatgctttatacctcttatgctcaagcttttagagcaccaacaattggcgagatgtataacgatgctaaacattttgatgccccattccccggagcaccaaccaattactggcgccctaaccctaatttaaagcccgaaaccaattcaacaactgaatacgggttcggttttcaattcgacgacttattatctaataatgataatctgaaaattaaagctgcccatttcaatacgcgtgcaaaagattatattgatacagatgtcgctatttttcagggatatacacaatcgacgaatattccaagagcaactatttggggttgggatatcgagatgaattatcaatcgaagttctttagttgggatttggcttataaccatacaaaaggaaaagataatgccagtaatgcctctattacctctattgagccagatacattaaccagtcgcctcgatattcccgtacccaatagtgatttttccgtaggttgggtgggacaatttactaaaaaaacagattttacaaaacatgatcgctttaatcgcccgaccaatcgccaacaagcgggttatggtgtcaatgatttctacctccgttatgaaggtagtgcttcattaacagggctaacaacctcactggtactgggtaatgcatttgataaaaaatactactcttctgcgggtattcctcaagaggggcgcaatgcaaaagtactggtgagttatcaatggtaattaacaataaaataaacgaaacaataggagtttccgtgactaaacctctttatgagagctacctgcaagcaaaaaatgaaaaaaaagcatcttatgcgcgtgatttagcaacttaccttaatgtaagtgaagctgagcttactcacgcgcgtgttgggcacgatgctaaacgcttacatggtgatgttcgtgatattttaaccgctctcgcaaccgtaggcgaagtgaaagccattactcgtaatgaaattgcggttcatgaacatcttggtgaatataccaatgctcgttttaacgatcatgcaggattgatcttaaaccctcgagccctcgatttacgctttttcttctctcattgggcaagtatctttgcattaaccgaagagacggctcgtggcattcgtcatagtattcaattctttgatcttcatggtgattctctccataaagtgtataccactgataatactcatatggacgcatggaataccttaatcgatacttatttatcaccagaaaatcccgtattagagattacccccgctaaatcttttactgatgcaccggtaacaacggcattagcacaacagttagaacagcaatggcgctcgatgactgacgttcatcaattctttaaaatcctgcaagaaaataatctcagtcgccagcaagcgttcaaagcggtcagtgatgatttagcttatcaagtagataatagtgccttaaaaacattattagcactggcgaaagaagtacaaaatgaaattatgattttcgtgggaaatcgaggttgtgtacagatctttaccggtaaaattgatcgtttagtacctcatcaatttgaaaatagtgaacaagtatggattaacatttttaatcctgcatttacactgcatttaattgagagcgaaattgtggaaagctggatcactcgtaagccaacccaagatggttttgtcacaagtcttgaactatttgatagcaaaggtcaacagattgctcagctctatggacaacgcactgagggaacaaaagaacaacaacaatggcgtgagcaactcaacgctcttgctaaaatagcttaatagaaggatagctcaatgaaaaaatggcttcttttgatcctgtgtagtttgatgacattcaccagcctcgctaaacaacgtattgtcactattggtggtgatattactgaaattgtttttgcattaggtgcaggcgatcaggtcattgctagagatagtacgagtttagtaccagagcaagttaaatcattacccgatgtgggttatatgcgcatgctcaatcctgaaggtattctttcggttaaaccgacgctgattattgctagcgaattagctcgcccttcttttgcattacgtcgtatcgaaaaagcaggtgtacctgttgaaactattacgggtacacgttcattagaagccattaatgaaaaaatcgatgccattgcaaccctcttacaaaaagaaacagagagtcagcaattaaaagaaaagctcactcaatctattaatcaaattgccacgacgcctattgataaaaaaattatttatatcatgagccatggtggtgttgcccctatggctgccggtcaaaatactgctgcagatacgattatcacactggtaggcggaaaaaatgctatgcaaggttttagtagttaccgcttactgtcacaagaaggggttattgccagccagcctgatattttgttggtcactaaagagggaataaaaggtattggaggtatcgaaaaactgtgggacttgcccggcataaagtacacccccgcaggtaaaaataagcgctatatcgttgttgatgatatgggtttattaggctttaccttatcaacccccaaagttatgcaacaaattcgtcaagcattggagcaataatgtctcgttttcgctcaccgtggatgagtattgccattttactcatcttatttaccatcattacgcttatttctgttaatagcggcccgctagcactctcatttagtactttatgggatcgctcttttgatgatatagagtggcaaatttggcttgatattcgtttacctcgagtactattagctattctcgtcggtggcgctttagccatatcaggcaccatcatgcaaggactatttagaaactcacttgccgatcctggattactaggtattagcagtggtgctgcgctaatggtcgctattgtgattattttacccttctcttttttatccgtattttctttctacagtcatattattgccgcctttattggcggcttaatagtggcaatgattattttttcattgcatcaattaagtgatggtaacttggcaagattgctcctagcgggaattgccattaatgcgctttgtatgtcttttattggtgtattgagctatatcagcacagatcagcaactgcgccaattttcactatggatgatgggctctttaagtaaaatagactggaacaccttggcgattgcaactctcgtgattattcccattagtgcattagcctgttggcaaggtcataaacttaacctattacaactcggtgatgaagaagcacattatttagggttaaatgtaagaaaaacaaaatttattttactactactcagtgccattttaatcggttgtgccgttgcattaagtggtgttattgggtttgttggtcttgtggtgccccaccttattcgtatgcgattaggcagtaaccatatttggttattaccggccaccctattagggggagcaatactcttattagccgcagataccctgtcaagaaccttggtatcccctgcggaaattcctgtaggacttattaccggacttcttggtggaccttattttctttggcttattttacgacaaccagcaggacgcatgtcatgatggaaaatcaacacactccattattatatggcaataacttgagctataaaatcggcaataaaactattcttgaggatgtttctattgcacttaataccggtgagcttgtcacaatcattggtccgaatggtgctgggaaatcatcattattacgtttattgaccggctatactcccccgacacaaggagaatgtttttttaaagggaaaacttactcacagtggaatagtcaattattagcgcaaaaccgtgctgttatgcgacaaaacagccagctatcattctctttttctgtagaagaagtcgtcgctatgggaagagcgccacatgggcaaaaacataaacaaatcgcaatagaaaccgcgctattacaaaccaattgtttaaagcttaaaacaagagattaccgtcaattatcaggtggagagcaacaaagagtgcaacttgctagagtgcttgctcaactttggcaaccgacacctgagaatgttgcgctatttcttgatgaacccacatcggcacttgacctctaccaccagcaacaaagtttgcgtttattaaagcaactggtcaaaacgcaaaatttgatggtgtgttgtgttctgcacgatctcaacctcgcctccctttatgctgatcgtattttattactgcatcagggaaaattagtttgcgaaggtacacctcaagatgtactcaccgctgagaatattgaaaaatggtatggcgccgaggtcagtgttaatactcatcctgagttatctcaacctcaagtttttttacgcccataaataataaaagagaaaggactgagtcctgttgaatgcagagctcagtccttaaaagacgcttaataacataatttctattggatgattattaccttcaccaaatagagtattactgcaatggtaaagcaaaactcacttttaccgtctccatgggtacttctgtttttatgctttgaatgctaggaatttgtgttaaataatcagcgtgaaaacggcgataagtggcgagatcttttgtcacaatgcgaataagtgcatcacattctcccgccattagatggcattcaaccacttcgggtaatacttttatcgcctttacaaattcttcaatagtttcagcatcttgtgctctgaaccaaattcgcgcaaataaagataatcctgcatcaactttactaccatctaatacggcaacataacgcgtgatcacacctgactcttcaagtaaacgtacacgacgtaaacaaggagatggtgagagtcccacttcttttgccagttcgatgttttgaattttgccatcgcgctgtaacacttgcaaaatatgcttgtctatcttatccaattttattgacatcaaagattaaccttagttctatttgtggaattttattgccaattaattatttttgttagcaacaaagcaacccgatttttacgaaaatatcatataatttttcagctaaattgcacagcaaaaacgatattttcttcaattgctcaatcaggtgaaaaagatggaatttaacactttgttattctttgcccttacagtactgcctttaatttgcacacctggccccgatattctttttatctcctcacaaggattagcgggaggaataaaatcagcgtggtttgccaatatcggtgtcatttcaggttatatcacacatgctattcttagtgctttgggtcttgcaacgataatggcaacctatcccattttcttttatctactaaagtggctaggtgtgatttatattacctacttagcaatcaaaatgctgatatctgcctgccaaaaaggccaactcacactacatgcagataaaaaaacacatctctttcgcaagggctttttaacgagttttcttaatccgaaaggcttactcgtctatctggctattttaccaaattttatcaataaccagaatgatatcgctatgcaatctctgcttttatctgggatatttatcactatttgtctatttatctatggctttttaggtacgattttcgcttatattggtttaaaaggcggattaagtgataaaggacgccgttataatgatggcattgccggcagtttacttacctttgcagccgttaatttagcccttaattagagggctagcatcactttatagtgatatttgctcaatgccgtgcaatatgaccatttaactgatgaatacgtacgctaatgttctatttacgacgtaattttcgacacccttcaccaataatttgcattcctttttcagtctgaccattccattgaaaagaagagtttaaacgaaaagcatgattaaactgtgaactggtcgaaaacatagcacctggtgcaatactcacccctctttcgagagcaaaatggtacaatgaattagcatcaaagcttggctcgaattctaaccataggaaatagcctccgacaggaatattcactttaacatctttaggtaaatgcgtttgtatggcctgtaacatacgataacgtctctgctctaataataatcttaagcgacgtaggtgcccgtcataccccccttgtgataaatagtcagcgatagcttgttgtgttggcatactcgctgatacagtactcatcatttgtaactgctgtattttagtcgcatgttttccggctgcgacccacccgactcgaaatcctggcgctaaacatttagaaaaagaagcgcagtgcaatacgctattggatttatcaaagcctttcacaggcattggcgcttttggactattatacagttcaccatagacatcatcttcaattaaggttatctgttttgccgctaaaatttctactagtctgattttattttcatcaggcatagtgccacctaatggattttggcaatgactcatcaaccaacacgctttaatgtcgtattgttctaccaccttctctaactcatctaaacaaatgcctgtcaccggatcggttttgatggcaatcgcttttaatcgtaaacgctctatcgcctgtaatgcgccataaaaagcaggagattctatgacaacccaatctcctggctcagtaacagcttgtaaactaaaacttaatgattccatcgcacctgcggtgatcacaatatcgtcaggcgatacatgaataccttgcagtgcatagcgttgggctatattacgacgtagtttttcattaccaggaggtaaattaatcactgaactttgaggggctaaatgtctagcggcagaggctaatgctcggcttaatttaggttgaatgaataaactgggatctggaaaggcggaaccgaacggaatgatattgggatctttacaggcttgaagaacattgaatatagaggcgcttatctcaacattttcactcatatgtagccctttgctggcagttacttgagcaaaacctgtattgcgatgtgcaacataataacctgattgcggacgagcggtgatccacccttgactttctaacagttgataagattgtaaaacggtcattaaacttaaacctgattgtttaaccgtatcccgtaatgagggtaaacgatcacctgattgccaaatattatcttcaatttgttggcgtatctgtgccgcaagctgttcatatcgagtcatatttacctattcaccctcaaactgttatagtcgtttttaaacttattgtcactattatagtttactgtcatatggtctacttatccacacgatttacctgctatttacagatcagcgcgatttgtatatcaaaataatgaggttgtttatgtttgggttaagtgcctttgatttggcgcgtatccaatttgcgtttaccgtttctttccatattatcttccccgcaattactatagggctagccagcttcttagctgtcttggaaggcttatggctaaaaactcgcaataaggattatttagcgctattccatttttggtcaaaaatattcgctgttaactttgctatgggcgtcgtctctggtctcgttatggcatatcagttcggtactaattggagctttttctccgattttgccggctctatcaccggccctttattgacttatgaagtacttacagcattcttcttagaagctggatttctaggtgtgatgttatttggctggaacaaagtaggtgaaaaattacactttttcgccacttgcatggtggcattgggtacattaatgtcaacattttggattttagcctccaacagttggatgcaaacaccacagggattcgaaatcgtcaacaatcaagtagttcccgttgattggctagcggttatttttaatccttccttcccttatcgtcttgctcatatgggcgttgctgcatttcttgcttcggcattctttattgccgcctcggcttcatggcatttattaaaaggcaacaagacctctgcaatgaagaagatgctctcgatgtctatatggattatcttaatcttagcgcctattcaagcacttattggtgatatgcatggtttaaatacgttaaaacatcaacccgccaaaattgccgcgattgaagggcattggcaaaataatcctggtgaggctacaccgttaattctatttggtataccggatatggatgaagaaaaaaccaaatatgcccttcaaattccttatttaggtagcctgatattaactcatagtttagataaacaagtaccagcactaaaagaatttcctaaagatgataggccaaattcactgattgttttttggtcatttcgtattatggtcggccttggcatgctgatgattttagtgggtgtatggggcacatggttacgttataagaaaaaattatatcaatctaacctcttcttgcgattcacttttctaatggctccttcaggattaattgccattttagcgggttggtttactacagaagtaggtcgacaaccttgggttgtgtatgggatacaacgaacacgtgatgcggtatctgctcatggtgaaatgcatatgagcattagcctactgattttctttatcgtttatggatctgtattcggaattggatatgcctatatgttaaaacttatccgcaaaggtgcgccggaggttcaagatgggaattgatttacccgttatttggttcatcatcatcgtatttagcacattaatgtatattgtgatggatggcttcgatctcggcattggcatgctctatccttttataaaagagagagaagatcgcgatttaatgatgaatactgtcgccccagtatgggatggcaatgaaacatggctagttttaggtggtgcggcgctatttggtgcgtttcctttagcgtattcagtgatccttgatgctttagccatgcctttaactatcatgctagttgcgcttattttcaggggcgttgcttttgaatttcgctttaaagccgatgacactcataaagttttttgggataacgcctttattgtcggctctctattaaccacctttatgcaaggtatagtcgtcggtagtattgttcaaggtttacccattattgaccgtacttttgcaggaagctattttgattggctatcaccctttgccctgttttgtggctttggtctagtcattgcctactcactgttagggtgtggctggctcattatgaaaactcaaggccatttacaacagagtttgtataaagtgatcttgccattaacgttcgttatgctagcagtgatagccatagtcagtttatggacaccattagcacaaccggcgattgctgaacgttggttttcactacccaatattttctttttcttacctgtaccactgctagtgttatatagcgcttggttgattattcgcgcagtaaagaaaaaaggtcattacttacctttctttgcttctctagcgattatatttcttggttttactgggctagggattagtatctggccaaatattataccgccggcaattagttttatcgatgcatcagcaccaccggaaagccaaggttttatgctcgttggtgcgctatttatcattcccattattctcgtttatacattctggagttattacgtattcagaggaaaaaccaattatgaagaaggctatcactgatccgaaccctgaaacaaaaccctcattactgaaaaaatggggttggttaattaccatttggttttgtagtgttttagcgctatttgccgtttcttcgctatttcgttttttaatgacggcagcgggaatgaaagtaaagtaaaaaatcaatcaggtaatataaaaataaagcgggataaattcccgctttattttagttaaaaaaattcctctttttaactcgcgttactgttagtgactctcccctcataaaaatacaagcgctttaatttgttgatttttattttctttatttacatcttatttgaactacatcacgcttcgacaagtcaatcttattcatggctttactaaattagtgttaatagtgataatgactatcattattgattgtaaatgataatatataacaagtaataaatagcttagatgggttggataaacgtgagtaatcaagacagcacgcaacaaaagaatatttatcgtcctgcaccacctcgtttggtgcaagtaaaacgtatagtagatatcacgccgggcatgcgctctattacctttactagcgatgacttggacaattatccaagtcacacagggggtgcccatttaaaaatatttttacctgtagaaggccaaactaaaccaacaattccaacactcactgacaaaggccctagttggcccgaaaaccaaccaagagcgatagtacgaacttacagtgtgcgagctattcgtcctgaattaaaagagcttgatattgaatttgcggttcatgaagatgcagggccggccattaattttgctttaaatgccaaggtaggtgattatattggcattactaatcctggaggccctgatcccctattggctcccgcctctcattactatatggcagccgatcccagctcattacccgctttaatggcattaattgaaacaatgtcacccgatgtacagggtaaagcggtgatccgcatagaaaatgaatccgatcgccaaatcattgatgctcctcaggggctagaaattgtttggctagtcggctctgttgaaacacaaactcaacctctgattgatgaatttatctcttggtcgttaccaaaggaagatgtggcattttggatcgccggagaagataaaattatccgtgcactaagacgttatattcgtcgtgataaaggctatgagcgcggacagatttatgctatcccttattggcgttttggctttaatgaagaaggttatcatgcagagcgtcatcatgttatggataatgaagatgtaagctaagcgtattttagataaaacgagttggctgtaccggcagcatattaagaccctcatttaatatgctgcctttttataggaatgataatagcgaagaaatctttaatatttaacttatataaacaataattcacctaacacaactcctgacaaaacaaacaaaaaaactatcaactcatcaaaattaaataaataacagaaataaaacccaatttacacagtcaatttaaacaaaaaaatataaaccattaagccaatcaaaagttttcactaaaataatatttaattattattgaaacagaacagtaatttaattattataccgcagcttgacgttactctttattagctaaaaataacatattgaacttaatttatttatatttttagagtgaaaaattcaaaaacaatagcaaataataattttattatcttcaattgattattagaatttgactgagtcaaaaaataatagagattaacctaaatctatgtatttttactattgaattaaggatgaaaaatgaattggtacttagaggttattaaaaataattatgctaatttttcaggtcgtgcgcgtcgaaaagaatattggatgtttatagtggtaaataccattattttagctgtgttatatgggatcatgttctcttctatcgacagttatactggtgaaatgagtggtacaggctttgctgctttgattattatcggtatctactctttagcaactattattcctaatattgccgtgacagtgcgccgttttcatgaccaagatagatctggttggatgattttattatcatttattcctttcgttggcggactgatcctgtttatttttatgtgcttagatggtactagaggtgaaaatagatttggtcttgatcctaaagcctaatagctaattaatttctatcttaatacagtgagtaaactatttatataatttacttactgtattgattctcctttctcttacagttacttctcttatcccctattagcataggattttatgcctgattattttaagtaatattatccacatactattatgctcatgtatgccatatagtaatttaaataacatgaatgttttttatcggcagcatattaatactcttatttaatatgctgccttttttattgctatgctaaagaaatattttaatcactatatgctgctaatacatgctgacatagactagaacgcacacaatcttcttcattaaatttaatgacaccaacacgctcattagcttgaaaacgacttagtgcatctgctaatcctgaatttacattggcaggtaaatcgcattgagtaatatcaccgttaacaatcactgtcacattttctcccattcgcgttaaaaataatttcatttgattaatggtgacattttgcgcttcatccaatatgacaaatgcattttcaaaagtacgtcctcgcatataggcaaatggggctatttcaactttgcctatttcaggccgtaaacaatattgtaaaaaagaggcgcctaaacgtttaactaatacatcatagacaggacgaaaataaggcgcgaatttttctgctatatcgccaggaagaaaacctaaatcttcatcagcttgtaatacaggccgagtaacaataattcgctctatctctttattaataagggcatcagcagccattgctgcacttaaaaacgttttaccacaccccgcttcccctgttgcaaaaaccaaattttgatgtttaatagcgttcatatattggcgttgaacttcattgcgaggagagagtgttcgttgatcacgtttctctctcgccataccaattgtttctagatccccaaatcctggtaaaaccataacattatctcgatgggcggcattacgttgctctttacgtaatgtacgtttattttctctacgtaaacgtgttgctactttttgtctactcataatggtatttacctttgttagtctcaaaaagtcatcagaacaatcattgtttgactagaaaataaggtgagcctccctcagactctattgcgctgtagaaaacaaaaaagccggtcacaaacttgagcattaaacatcaatgcacagttgctaccagctttgtcttggtgatttaaaattttgattgcttctgtcattcatattccccatcatggagttagagtgaaaattaacgaagctttatgacagtataatgacagaacaaaaattttttcaatatttaagtcattaataacgcgattaagttaacattttgctaacaaagagcgctattgaggggaataaaatgcgttttttaaaattaccttttatttattggctgctactcaattgcatcccatttattggctttgaactacactcaggcaatataaaacccggtgtttttttctatttaggtgctctaacgatcatcacttcagggatttggctatttttctgcctttacttttttatcaaacataatacatctcctaaccctcaccagacaccgcgccatttagtcaccacaggtccatataaaataagtagaaatcctatgtatcttggctttctcgatattagtattgggctgttttttatttttggtaactggggatttttaggggctgcgcttgccttctactttattaccgatcgctatactattgtgcaagaagagaaaatattaagtgagcggtttccacaagcgtggcgacaatattgccgccacgttcgacgctggatataacagatgtagactaaagcgctttacagttatttgctaatcggtaacccgctttagttgcttcattttcggttttaaaatataccgcatttttatctgacatggttctataaccagtacagtgtgaaaaatgataaattttactatttagattacctttgatctgctcatcttgggagactgtgggcgctttaggcatttctattttgtcagttgtaggacgatatgttgcagttaatcctgcaccactatttttatgtcctaactgccacttcatttgtcccgtaacaaagggattatgatgcccaacaatgttagcaattcgattatctcgctctctttcccacggtgttggtgggtaagctttatcccatgccataaaaagctgttgttgttgacgtgacattgagaggttataacgatcatgtaagtagaaatagacacgtgcaacttggcctttcacctcattacgaggctcaaaggtgcgagaagcaaaatcgacccgactgcgacactggccatattgataaggcgcttgagatgataattgaccaaagctaaaattactgcgatcaccattcacctctccaatcgaaggcgctagattatgtaaatcagcctcaattttgccaaaaataggatcgtttttaacacagttagctcgcccaccattttgccagcattgacgttgatgaccaaaaacccaagcagggacgatatgttcccattcaatgcgtgaagctcgggtggcttgtgccctcacttgataaccacaactggctaaattaacacgtccccccgattttcctacccactcccaatgacaaccacaatacagcgtaccttggttgttttgattttgatcataataaatgcgttctctggctagctgttttgctttagtgaaattttccggtgcctgtgcggatacatttagcgtaataataaataaacctaacgctaaaacaatatagtgtaatatttttctcaaagtgctatctaccttatactctcttttattaaacctaataagatttattattaaataaccaactaataatcttatttttatttgcgcttaccataccttttttatttatttgaagatatctttttaattcattttttgatggatttactaaaacaatacaaatgaaaagtgctagaaaaaggcgctattcatgtcattgtgtaaaaacatctttgctatggtttaaagattggtattttaatggaatagataaaatgaatgagaatatgctgaatttaatgaatgagctcgtggaaataaccaaaaagcatgcgaacaatgaagatgttaaagcgcatgctaatttagagtcagaaaataaattaagaattcaaattattatttctggtaaaaacgaactggatattacattaaattcgctacaacatgcggtataaagcatttatacactgggacgtttacgatataaccacaatcctggtaaagatagcccaatagaaagagcacccacaataaatgaagctttaagaaaattagtcactaaagcttcaaaaatttcttcgctatagcctatttgagtcaacttcaccacggagatcatcgcaacataagcattgatcccaggaaacataggaataatcgctgcaacagtgaaaacttttggatgagctaaccaccagcgtgaccattgaatacctatacaaccgactagaatagcggcacaaaagcttgcccactcaatattcataccacttatcattaataccgtacgagagccatgccctattgcacctaacaacgcacaatattttaatgcacgtaacggtacattaaataccattgcaaaccccaccgcaggtattgccgctaaaatcatatcttcaattagcgttagaataatgttgattatgcccaatctcttaactcccatactgccatcgctaaaataacccctaagcaggtagcaagtgttaacatcgtcgccatcgcccagcgtgcgagtcctgtattaacatgacctttaaacatatcagcaacagcattaattaaaggaaatccaggaactaataatagaacgctcgcggccattgatatagtggcagtaacttgaaaataagggagttttagcaataaacctgatactgatgtcgcaacaaatgccgtaatacaaaagttgattaaaggatttacttgacgatgagtgaggagctgacgaacccacattcccattcctccccccaaagcagagactaaaaagccatcccaatcaccgccattcaatttggaaaaacatccacaagaaagtgcaaccataacaataattatccaacgtggataacgtagtggtttgatatgttcaaaacgtttccttgcttcatcaatatccgcgagatgatgctcaactaaaataacaatgtgctgaacttcggtaacaacatgcatattgataccacgatcaacaatttttcgtgttgaggtttggcaatgaccattaactattgtcgttaataccaccgcattggctgaaatggccgtttcaacttgatgaacgcctaaagccagcccaagtcgcgttgagagctgttcaaccaacatactttcagcaccatgttgtaacaacaatagcgccgtttgaatacataatttcgtaatttcacgctgtttatcttgtgaaatggcatattcttcagccattatctgattatccatactacgccttagtatttatcaaaaaacgcgccataaccaattgaaagcttatcagtatagttcaatcatgacgctatcgtctttctatactattatgaataattaaaatatttaaggctgaaagtagatcaaagttttctcttactatcatatgattgtaataaatataaaatatagtgattatatttctcaaatagtattgatattagtcatcatatgttgccaaaggaaatcaagatcttccggaataggttgtgaattaaataactgttttttaagttctttttcttttatattaccaatatgagaaataagcacaggataaactacatttttaaaaaaatgtttcccgtgtatatattgttttaattgttgatctactgtgcatgcatttatttcttgctttttatgcttgagtttttctaataattgagaaggctcaagatattgatgccacttttgtaaaatttgttcaatttttactgtatcattgcttgtattaagttctaataacgattctttaaatcccaaacttcttaatccttcccataaaggattaatgattgcccataccgcagcatgatttcgccaattttcaagctgagtctcgatatctttccttaatgtttcacatccattttctatgctatttttcttattttcaggtaatgcagaccaaatttcatcaggaagaacaagatagttctcaatacaaaaacgaggaagaatgaataaattgggtaattgttcttgtttttcctcaattttagcattatcccattcatctctatcgacaataccaagccaatcttgttcttgggctaaaatatccaacatattttgtttcttgcccgtgctagcaataacccaatactgttcccaactaggaaacttttttcttaaaaaagcgccaaaagctaactcatcatcactgccttcaactaataatacttttttagttgagctacctacttgttgatcttttattcgattaattgttccatcaattttcgacattcaccgatccttttagcaaagtaagatcaatacgtgaaccaaaattttcatagcgttgccaaacttctgttgagtgtgacgttaaaattaactgccctttcttattagccacaatattttcgatagccgctaagagaggtgctataacagaaggatgtagatgtagatcaggttcatctattaatacaattcctcctggttttagccaacgttggattgtaaataacataataagtatttgatgttcgccagaacttaactcatcaaacgtatgttgccttccatttgataaaataatctgttgacgtgtacctggaagaatttcactatcaattcttttatctgaaaaaaagtaatttaaactctttatcatgttagggtattcattaggcagtgtcgcttttaaattaaacagtgaagtttctatttgcccattccaatcattagtcaccgtataagtcgcgagccatgcttggttaagatcgtctgggtataatgattttctcgttgctgttggatttacccatttacgcgcttctgcatctaaatagacaatattaggaatagataattctggatccaattcattataaagtgattgaatacgtcttttccctaaatatttataggtctcaatcagattatcattatgtttattttcactagatggaaaatataatttatttttctttttattatttgaaatttcacctatccacattacatctaaatagtttgttactacttgggaaaaaaaatcatctgaaccataaaaaagtccaattttaatcttatcatcagaagaaagattaaaatcttcaaaaataatagcgatccctccccaacgttctaaccattttcgtgtattgctcgctggagctaacggttgttcagtacttagccaaatacctaatgcttcccataaaatagctatgccccgtaataaagtcgatttaccacaaccattattaccggtaaataaaacttgagcttcaatctcattagaccaatcatcttctaacttaataacaccatcagctaatggtcctacagattgtgtataaattgaactaattctcattggaatgccctgaaatgtttactttaatagctaaaataccatctctttattctcgcgtctttacctctttcacacaacgataaaatattctctttctattgttaacttacatcatcaatatgactattacgctttcaaattagtataaaagcaccttaggatgcttttatacctaacttaacttattcataatcctttatttattatttattgcccagaagtttattagcttgagcataagccccatcaagggtttcttcaacaaagataggtacaccgtacaccgcagaaacaacgggagataactgcatcagttgctctttatcatttgtttgttgattgacggtcatgatcattccagcacaatattgacttaatggcattttccctgttttcagccagcgtctaacggctttcatgccctccatatcctcttgttcatttttcttgttgataggtgggtaaaccaatacaaagttttgtttttgagcaagcactaagtccatttcagcaatccagttattagcatgctctaacgtttctgggaaaacctgcatggtaataatgggaaattggtcaacagacattattgtaaaattgttattattcaacatattgttatctctcagtcattatctttactttagattagaataattatcatttacattcaataaaaaaggctctttattagtgcactgatcgcattaatagacaatttttgtcagcaataaatttctatcgacttatattatatttattcttttaatatataaaacactataattattttatatattctttataattattttatttttaataaataagctattcataaaatgaccactttataaatttgaaaatatatttaaagtcatttaaagattatcatgacagaattcattaatttataactaagagaaaattaatatggtaagttttttgagaacaaagtccgctgtcttattatcaatagttatttttcctattttctttttattatcaggctgtttttcattcgggttaatgttatcaactaaaaatgataatggctatcatcgttctcattggaaaggcgattcaattaccgcactctctctagcaaaagatagtaacggtactagcggatgggtatttattggtgagcattttgattatttattaataagaggtggagataacgcagtaaatattttaagagatcctcttatccaccatgataaattgagcgtagaaaatccagttgaatttattattgataatcaaaagaagcaatttaatgggaaaattaaaataaattataactggataactcaaaccgataaagaagcagcactaacttacggttttatatgtaaaaaagatataaacacctgttcactaaaaatagataatttacttggaacagttcatcaaaaaaataaagaacaaaaaaatgagtatttactaccttttaaccatccctttaatgttgaattctaccaatacaaagaaaatcttattggtgccagcacaccaagaatattattacccgttactttggcgctagatatagttacatctcctttacaattgctgatgatcccaatactaagcaagtagtatcgataaaataattgattatcaaacactaaatattctagtttgattaataaggagatagtgttacctctatctccttttataccatattatactatgatgttagcctatttcatcgcttataggattaacgcacaaccaacacagattgtttggcgtaagccacaattcctgatgcattagagcctaataaatgagttgaaatgctaggacgacgagagccaacgacaattaaatccgctttaattttttctgccagctctaacactttatctcttgctgagccaaatgcggcagagaaatcaacttgctctttaggtaaatctacagaattagctaattcttgcagttgttcttgaactcgttcaatcgctttattagcaaaagagcttaacatatcataatggtagctataactaattgaaaaacgtgaaacatcaggaatagcatgaaacaaatggatcttagccccttcaagctttgcaatataaacagcgtgttgtaaagccttttcggttaattcatcttctgaaatatccacaggcactagaattgtcttatacatagcaactcctcattattaattatcgtctgtttgttattttgattttttcaaccaacagtatgattgctaatcctcttcaagatgccatttatgtaattgtcgatgaataaaaggggtcaccactaatccaatcgataaaataaaaacacactgaagaaacaaaccataaatcgcaataaaaaaacgccctgttggtgttgcaggcgcaggctctaccggttgaccacttaacattgatattgcgtttaatgaggactccataaaagtatgtccttcaataaaatagaaccctagcacgcccggtaataatcctaaaaaaaagaatacagtacctattatatagtagcgtagaatacgtagaataaaatggtcgagccttaaaagttcttgtgtaaatttttccatcccattgactctattaatgcgcaacccaatgaaaataatttaataatggtaaaatagataatttaaaagagaaaaaataggttatgaaacctcataacctattagcatgtgtcaattaacgaaccactaacacagaaatatctgcataacgaacaacgcctgcggccgtagagcctaataaatgtgtgctaatgttgggtctgcgagagccgataacaattaaatctgcttgaatatcttttgctgtcgttaaaatttcatcacggggagagccaaaagtgacagtgtaagccactttttcagcaggcagatccaccgaatccaccaacatttgcatatcattttcggcttttactgtcgctttgtctttaatttcgggataacccagtgaataagcattaataatggctgaagagataggaagcacatggataagatgtaaattagctcctgtttctttggctaaataaacagcatggcgtactgctttactggttaactcttcttctacaatatcgataggcactaaaattgttttatacataataactcctctcaactctccatttgccttaatagtatcgcaataacctcaagattactgtgagtcaattaactaaaaccaacctaatatcaattatcaatcggctttaagtattaatgagttactacaaaaaataaactactcagttaaaataaatcagtgctgtgctgttggtgggttgcccacatttggttgcgaaccgcacggatggtatcaataagctctgatgcggttaatcctattggccctattccttgttttattaattggtctgcggcaataccatgtatccatacggcactcggcacagcctctgcgattggcataccttgtgctaaaaaacttgccatgacaccggttaatacatcaccgctccctgctgtcgataatccactgttccctgttgtatttactgtgatatttccttgaggtgaagcaatcaccgttccttgtcctttcactatggcccagcaatgatattggcgtgtaatttctattgctgcttgttgacggttattttgaatatcagcaacatcacaatgaagtaaagttgcggcctctttcggatggggcgttaatacacaattagcggttaaattcgtgttaatatgcgataagtttaattgagccaataacaccagcgcatcggcatcaaaaacataaggtattttctcgttacgttgtgctagtactgtagtcagcaattgttccgaatcagaggagagccctaaaccgcagccaatcgcccatgctgatatttgtggttgctctaataatgttatggctgtttgtagcatcagttcgggtgcactatcaataaaaggcagtggcaattgtggttgtgcaaagcccaaaaagactttaccacaccctgctttaagcgcactttttcccgccaaaacaatcgcaccactcatgccttctgagctgccgataatggctaatgtaccaaaagtgcctttatgtgtatttcccatatttcgctgagcgagtgcaggatagtgagatattgcttgtaatagttgctctctgttcatctattattcctcatattcctcaccttttattgctgagtgtttatttttatatcaaaccgcattaaacggtaatgggtaatttaaagtatagcgtgatatcgatgacataatcataataagagtgtgctagcggaaatgatttcttatctactatttgtttattcgttttattcatttatttcttttatgggcgataagaaaagctattcataccagatgaatacaatgttattctgttactaggcattatttttaggttaataaacaaacgatataaagggaaattcaccatgaatgagaagtttaaaacacaagcagatgttgaaacattagcgcaagaagttgcatgcctaaaaacgcttgtgacttatatgttaaaagcattaggtcaagcagatgctggacgcgttatcttaaatattgagcgagctatttccgaagttgctgatgaacaacaagcagaaaccttccgcaacacattaaaccaaattaaaacagcttatcgtcaataatgatattgacgtcatcaaagtgcaattgcgcatgattttaatttattgtcgcttctttttgtgctgcacaaataagcaaaaagtaaatctgaaaagtctatatacttaattccgaaataaaccattctttattcatttaactgcccctctattgttatagaggggatttttttatctgtaataaataactaatgttaatcctattctgatttaacgctatatgggtttatatgttacacttacagtgtacgcaccaaaaataaaccatgaggcttataatgaaaccacttctgttatccctgcttttacttcctgctgttgcatttgctaacccaagtaaaatggctgaagattattgcaatacattcaaagatatctcagtaaaagcttatgatactaatgaagcgcctgagaaaatcgccaaagacgcattagcaacattgaaatctcaaaactttgattttgcaaaactagatgcaacggaagctgatttttctaatggcaccgttgaagttgttaaatctttacgtgatgcaaaagcagaaattggttcacgtgaagagttccaagaaggcttaacgcaaattgttgcggcatgtaaaattcaaatggattctgttttacaagagcagaaaaaataatccattgactgccttaaatgattaagcgcagagtccaaggagcagaaataatcctgctctttttttattaaaactcccctatttcatttcttacgtttaaccctgctaacttttccctgccgctatttattgtgcatgatagtatccatctattgcgattaaggtttataatactttagtaaataatcattagaactggccataacaaggagatattgtgagcaacgaacaatccatccagcgattaagaagactacgccagtcagagaacctgcgcgcgctgtttcaagaaacgacactcagcaaaaatgatctagccctacctattttcgttgaagaaggcttagaggattatcagccgatcaaaagtatgccaggtgtggtacgtattcctgaaaaacgccttgcttatgaaattgagcgtatcgctaaagcgggtatcaaaacggtcatgacctttggtgtctcacaccatcttgatgaaacaggtagcgacgcttggaaaagcgacggtctagtttctcgcatgtctcgtatttgtaaagatgctgtaccagaaatgattgttatgtcagatacttgtttctgtgaatatacttcacacggacactgtggcgttttacatggtgaacatgtcgataatgatgaaactatccataatttaggtctacaggcggttgccgccgcacaagctggtgctgattttattgctccctctgccgcaatggatggtcaagttgccgctattcgtgctgcattagatcaagcaggatttaccgataccggtattgtttcctactcaactaaatttgcttctgcattatatggcccattccgtgatgctgctggctctcgcttaattggtgatcgtaaaacatatcaaatgaatccgatgaatcgtcgggaagctatccgcgaatcattgattgatgagcaagaaggtgcggatatgttaatggttaagcctgctggtgcttatttagatattattcgtgatgttcgtgaacgtacactattaccgttagcagcctaccaaattagtggggagtatgcgcaaatcaaatttgctgcattagcgggtgctatcgatgaagatcgcgtggtaatggaaacactaggctccattaaacgcgcaggtgctgatttaattctctcttactttgcgcttgatttagcagaaagaaatctactttaatcacccttgtatctagatgacaagtgaatagatcactaggaatcttcagtatatgactaaccccaccactaaaaacatggcggttagatacgctaaatacttcaagttataacgataatttgaagtatttttcaccctatattatgaggcgactatggataactgtattttctgtcaaattgtagcgggaaaagcaccttgccataaaatttgggaggatgaacatcatcttgcgtttctttcaatcttccctaataccaagggttttacggttgttattccgaaaaaacactatccaagttatgcttttgatttaagcgatgaagccttagcgttattgatcatcgccactaaaaaagtggcaaaaatcctagataaaacattcccagatgtgtcacgcacgggaatgttttttgaaggttttggcgttgatcatgttcatagcaaactcagcccaatgcacggcacgggtgatatgacaaaatgggcgcccattgaaaacaaacaaaaggttttctttgataactaccctggctatctttcatctcatgattttgagcgcgcaaatgatgaggaattagcgcaattagctgcgcttattcgccaaaatagtcagtaattgatccagccataataaactaatagcaataacggataagcatttattacttatccgttattagttaatattgcacaattattctttatttatacgtaattcgcgttggcttagctaacataatttctgtcttagccggctcggtttgtgcaatcactttaccgtgacgaatagagtaacgtacagggacttgacgacgtaaagcatcaaaaccattttcagcaggaagaataataaagttagcactattaccgacttccacaccataatccgttaatgccaatgtttttgcactattatgactgataagttgtaatccattatcaatttgcccatagcccattaactgacaaacatgtaaccccatatgcagcacttgtagcatatttgctgtacctaatggataccatggatcaaagacatcgtcatgaccaaagcaaacattaataccactcgctaacatctctttgacacgggtgatcccccgacgttttggataactatcaaaacgcccttgcaaatggatattcactaatggattggctacaaaattaatgcctgacatttttaataaacgaaataaacgcgaagtataagcgccattataagagtgcatagcggttgtatgacttgctgttacccgtgagccgatattttctttatgtgctaatgcagcaacggtttcaacaaaacgcgattgttcatcatcaatttcatcacaatgcacatcaataagtcgatcgtatttcagcgctaatgcgaaggttttatgtagtgactccacgccatactcacgggtaaattcaaagtgcgggattgcccccacaacatccgcacctaatttcaaggcctcttctaataatgcttcgccattagggtaagataatatcccttcttggggaaatgccacaatttgtaaatcaacccaaggtttgacttcttgtttgacttctaacatggcttttaaagccgttaacgatgcatcagaaacatcaacatgggttcttacatgctgaataccattggcgatttgccattgtaatgtttgccacgcccgttgtttaacatcatcatgggtgagtaatgcttttctttctgcccaacgctcaataccttcaaataaggttcctgattgattccagtttggctgtcctgctgtctgcgtggtgtctaaatgaatatgaggttcaacaaaaggagcgtgaaccaatccaccttgtgcatctaacccttggggatgaaaatcgctttgcggttgtggctcaatggctgcaatctggttatttttaactgtaatgcgccataaaccttcttttccagctaaacgagcatgattaatttgttctatatttttacccagcatgacttatctccgcttgtcgagctgtacgacgatttaatattggatttaataccgcgtaactgattgcgccacctaatacggcattaacaggtacgatccctggtaaccagtgaccggcagcaataccgatggccacagcaagtaaggctacccagttcacattttgcattttgtcagcattgaattgattataccgcgctctattcatcagataatctgcaataataacgccacctacaggggggatcgccgcggatagaaaggttaaccaaccaacaaaattattataaagccatagcgcacacaatgtgccgataatgccattaaccacagataattttttactggataaccctgtgatattggcaaaacctaaccctgatgcatataacgcattatcattggtcgtccagatatttaaacctaatacaatgatcgccggcagtaataaaccttgcgctatcatcacatcggaaatatccgccatgcctaatgatgccgctcccgcagcaccaaagacaaacatcaaagtatttcctaagaaaaaagccacaatagcgacaatcacggcaattttagggttacgtccaaaacgaacaaaatccgccgttaatgtaccggcactaataaaagagcctaccaccatggcaagggctaaattaaaatcaagttgttcggcaggcttcacagccattagtgtattaagccctcccatatcatgtaccgcaagatataccgagtaacttcctaggatagcaatagcaggaaccgcaataatggagaggatagttaatgcagagataccaaaaaacacggtgatagtcattaaaattcctgatattgcaatcaggagattaatatcaatccccgtggctttaccaacgggaatagcaaacatcgcaacaccgacaccaaaccaaccgacttgtgtaccaccgagtaaaaatgagggaagccaagagcctttaataccaaaagagtaacgagcaagaagatgagtggtgagacctgttttagaaccaataaaaccaagaaatgcggtgtaaataccaaggagaagattaccgataagaactgcgaggaagaaatcattaaaggagagaccagtaccaagagcgccgccagtccacatactggctgaaaaaaacgttaatcccaacatcacaaaggttaacgctaatccaccctttcttgcggatatgggcaccgggccctgactataattgttgtcctgagacactttaaccccctattcatttcaccaggccaaaaaatctgacgcattctatcggcataaaaattttatgcaaacgttttcgtactctgtttatgataattaatgggatcggtgatagaaaaaaaattgatatatctcacatcaatcctgatgttatggttgttttacttgagtcactcgacttatttaaaatgattgtaaaaaggagattgctttagaaatatttatgataacaatggaaagttcataatcatttaattatgaaaaaatacataaataatatttaataaaacttaaaaaaataaaataataacgaaaaaagaagctttactttcagtcacaaaaaagaggaattttcattcctcttgactattgttttgataagttaattaatttcttctggcaggtgaatgtccagcaacatagtaatctgcttggcttgctggcaatggtttaatgcctttaattttgtctgccattttttcagcaatcataatggttgtcgcatttaaattgccagtaattatattgggcataatggaagcatcaataactcttaagctttctataccatgaacgcgtccggcaccatctacgacggccatttcatcatttcccattttacaactaccacaagggtgaaatgctgtttctgcccgttcacgtacaaaagcatccagctgttcatccgtttgaatatctttccccggactaatttcttcaccgcgatagggatctaatgcaggttgcgccataatttctctcgtgatacgaatagcagccctaaactcttgccaatcttgctctgttgacatgtaattaaacaagatgcttggatgctgatgtggatctcgtgaggttatttttatacgtccgcgactgggtgaacgcatcgaccccacatgagcttgaaaaccatgcacttccactgcattactgccattataattaatcgccactggtaaaaagtgaaactgaatatttggccaagcaaacttttcacttgagcgaataaaaccccctgcttcaaattgattgctcgcgccaatacccgttcctttaaataaccactcggcaccaattttaggttggttataccattttaacgccggataaagtgaaacgggttgtttgcattcatattgcagatacatctctagatgatcttgcaaattctgccctacacccggtaaaacatgtactggcgaaatatcaaactcgttgagaacatcttcagggccgacacctgagcgttgtaagatttgtggtgatgcaatcgccccggcacaaagcagtatttctttacgtgctttcacatgctgtggcgtggtattcgttcctttaaaatagcgcacaccacttgcttttttaccctcaaattcaataatatcggttgtagcatgtgtctcaatagttaagtttttgcgcgatttagcttggtcaagataaccccgtgccgtactggctcgacgcccatggggggttaccgttctatccatagggccaaatccttcttgctgataaccattgagatcatcagttctaggatatccagcttgtacaccggcttcgaccatcgcatggaataaaacattattcccctttttcggtgtagtcacactaacaggcccactatcaccatgataatcattagccccaatatctcgggtttctgctttacgaaaatagggtaagcaatttaaataattccaatcttcaaggccgggtaatttggcccactcatcaaaatccatcgcgttaccacgaatgtaacacataccattaatgagtgatgatcctcctaatcctttacctcgaccgcactccatgcggcggttattcatatgtggctcaggctctgtttcataagcccaattatagcgtctaccctgtaacggataagctaatgctgctggcatttgtgtgcgaaaatcgaacctgtagtccggtcctccagcttcaaggagcagcacagtaacatcaggatcttctgtcaagcgggtagcaagaacgttaccggctgaaccagcaccgataataatgtagtcatagaccattgttatctcctctgtttcagtcattaaaattaaaaatagaatggattaaaaaacggatgaaaactccccaagttcaacttgaatagatttgatttgagtgtaattttgtagtgtgacaagcccattttcacggccaacaccggaatgtttataaccaccaacaggcatttctgctgcagattcaccccaagtattgatccagcaaattccggcttctaattgatgtataacgcgatgtgccgttgtcagatctcgagtcaccaagcctgcggctaatccatagacactattattggcgcgtaaaataacttcatcttctgtttgataacttaaaatgctcattacagggccgaagatttcgtcctgcgtgattttcatatcatcagtacaatcggtaaataccgttggcgccacataagcccctttcgccaatgcaccagcgaataaacgttcaccaccacaaagtagttttgcaccttgagctttacctaactcgatatagcttaaaactttttcaagatgagggaagctgactaatggtccaaagttggtatccatttccagtggtgaaccaacgcgaatacgagagacacgctcaatgattttagcttcaaaagcttgttttaacttttctggcacaaatacgcgtgttccattggtacatacttgtcctgaactatagaaattagccatcatggcgatatcggctgcggtatcaagatcggcatcatcaaaaataattaacggtgacttaccacctagctccatagtgacatcttttaagcttgatgaagaagcgctcgccatcacttttttcccagtatcgatcccccccgtaaatgagaccttagcgatatcagggtgctgcgttagccattgccctacagtggcatcacccgtgaccacattaaataccccttgaggcaaacccgcttcagtatatatttcagccaattttaatgccgttaatgatgtcatttcactcggtttaaaaatcatcgcattacctgctgctaatgcaggtgctgatttccataacgcaatttgaattggataattccatgcaccaatgccggcaacaacacctaatggctcacgacgggtgtaaacaaaagcgctgtcacgtagtgggatctgctccccttctagggcaggaataagacccgcatagtattccaatacatcagcaccggtgacaatatcgacataacgtgtttcagacaggggtttaccggtgtctaacgtttctaaatgcgctaactcatcattacgttcacgtaaaatatccacggcacgtcgaagaatacgggagcgcgccatcgcaggcatggcagcccatattttttgtccttgctttgcactttctaccgcccaattaatatcttcttcacaggctgattgtaaatgtgcaatcacctcacctgtagcaggattaattgcggcaaattgttcacattcaggttgtgcgcaatcaacatatccaccatgaatataaagcttgtgtaacggtgggttttgcatattttctcctttatagtgagtaagttaagtctgtttatcctggcaaagattaagttgcatatcgatatactcatcagtaattttttttgcttctgctaacgaaaatggctcctcgctaagggcactacgtagccataaaccatcgattaaagcggccaagcctttggcggctaagcgtgctttatcttttgttaacgcacgtccaaattcataacagagattagagtacaaacgtctatcattaaccttttgtaaacgatgcaaattaggctgatgcatgctacttgcccaaaaagccagccaagttttcattgcggtttcactggtttgtgacgtatcaaagttaccatcgacaatggcttgaatacgcaatttaggctcagcatcgcttaaaatacgtaatcgcattgcgacggcaaaacctaactgatattggatatggcgcattgccgcttccaataaaccatttttatcacggaagtagtggcttataatgccattagataccccggcctttcgtgcaattaatgcaatgctggcatcttgcattccgacctcattaatcaccgctaatgtcgcctgaattaattgctgtttacgtatcgactgcatccctatcttcggcatgttttcaagacctaaaaaatacattgaacacttttattaaacgtttttttaattgaacattcaatcaatattaactattgtttatcacaattaattcacaaatgacataaggagcagatcgtgaaaatttgaatctttgcatataaatcaattgattagcaaagaatgcaacttttaacttttagatgaataaatttttggaatttctgatgacaactcttaatagctcaaaaaaaccacagaaagacaagctcaattctgttgtttttttcgcttccgcaacgctgattttagcgttctcttttttcactattttaatgacagataccgccaatgcgtggatcattaaaacactaggttgggtatcaaaaacctttggttggtactatttattagcggcaactttgtacattgttttcgttattttcgttgccacatctcgctttggtaatattaaattaggcccagaacaatcaaagcctgaatttagtgtattaagctggtctgctatgttgtttgccgcggggatcgggattgacttaatgtttttctcagtcgctgagcctattacccaatatatgctaccgcctactggcgaaggtgaaacaatagaagcagcccgtcagtcgatggtgtggacattattccactatggcctgacgggctggtctatgtatgcactgattggtattgcactcgggtattttagttatcgttataatttacccttgaccatccgctctgcactttatcctatctttggtaatcgtatttatggccccatcggtcatacggtcgatattgctgccgtattgggtactatttttggtattgccaccaccttaggtattggcgtagtacaacttaattatgggttgaaagttctcttcgatttaccgcaagggttaggtgtacaaggtggtttaattctactttccgtaattatggcggtgatctcagccacatcaggcgtcaataaaggcatacgtattctttcagaattaaatgtattactcgctttagggttaattttatttatcctatttgctggtgatactgaatttttattaaatgcgttagtacttaatgtcggtgattatgtaaatcgattcttaggaatgacactaaatagctttgcttttgatagaccgacggattggatgaatagctggacacttttcttctgggcttggtgggttgcttggtcaccttttgtgggcttatttttagcacgtatctcaagggggagaactatccgtcaattcgttataggcaccttgatcatcccttttgtattcacgctattatggttgtctatctttggtaatagtgcactttatgaagtgatccacggtaatcaaacctttgctgaaacagtattagcctcaccagaaaaaggcttttattctttacttgaactctatccgggatttggtttaactgcttccgtagcgactattacaggattacttttctatgtaacctcggcagactccggttcattagttttaggtaatttcacttctcaactgagtgatataaataatgatgccccaaattggctgcgcatattctggtctatcgctattggtctattaacattaggtatgttaatggcagacggggtttctgctttgcaaaataccacggttattatgggattaccttttagctttgttattttctttattatggcaggactatataagtcattaaaagtagaagattttagacgcgtcagttcattaaacaccaatgcgccagcacctctttatggtaacaccaccatgaactggaaacagcgtctaggtcgagtgatgaatttcccaggtactacctatacccaacggatgttagatttagtttgtaccccagcgatgcaagatgtggctaatgagctgtcattacgtggtgcaaatgtctcgtttaatctttacccgctggaagaagagcctcgtttaaaccatttagaattagtggttgatttaggccaagagcagcattttatttatcaaatatggccacaaaaatattcagtacctgcatttacttatcgtgctcgtcgaggaaaatcccattattaccggctagaaacctatttatgggaaggttcacagggtaacgatttaatggactacaccaaggagcaagtgatcagtgatattctcgaccaatatgaaaaacacttaaactttattcacttaagtcgtgaagcgcccggtgcaacattaacatttccagaatcaaattaattagcgactgagctatcttatctctcaagggaacccgttttatcggttcccttttttattagcctgcatcacacacctcatgcaatacatcgctattttctgactttatttcatattgacatgcttaagctaattcctaaaaactgacctaacagtgaataaataatcaaaattaaaacatatttatttacttattgtgtttttttagtaatctacataaacaataaaaatgtagaataatttacttgggaaacatcacatgaatcgtcgttcatttttaacatcatcaagcttagtgatcgggggactttcattaagttcgtttgttagcgctgcctatgccgcagaaacttcaaaccctaaacagctatttaatgcagaaaatcctttactgttaaactttaatgaaaactcgctaggcatgtcatccaatgccaaacaggcgattattgatgcacttccccatgcttttcgctatccagatgatgcgcgaagcgcacttatcagtgcattaggtgaagaatttaagctatcagacaaacacatcactctaggtaatggctcctctgaaaccatacaagcagccgtacaatatgtggctaataaagcgcaaaaagcaggtaaagcggcacaactaattgtgcctgatccaacgtttaattatgccgaactttatgctgaacctttaggtgtcaatatcgtaaaagtgccggttgataacacattggcttttgatttaaccgccatgcagaaaaaagcacaagcatttgatggtattagcatggtatatctgtgcaatcctaataacccaaccgcaatgctgacaccaacagcggcattaacaaattggatcacctcagcaaaagaaaatgtcttttttattattgatgaagcttacgctgaatttgtgacaacacctgaatttaccagtgcgatagcattagttgctcaaggttataaaaacttgattgttacccgtacattttcaaaaatttatgcattagctggattaagggtaggctatggtgtggcagtccctgaggtaattagtgaagtagatagtttcgtttctattgataataccaatactgccggtgctgttagcgcattagcctcgttaaaagatcacgcttttgtggcatatagtcgcaagtcaattgatgtatcacgacaaatggtggttgatactttaaacgccttaaatatcgagtatgcaccttctcacgccaactttatttttcataaagtcaaaggtgatgtgaaaacttatcaagagagaatgaaagcggcaaatattatggtaggacgtgagtttcctcccgcattaggttggagccgtttgaccttaggaacccctgaggagatgagttattttgtcgcgacgttaaaagagtttagaactaaaggatggatataatcctctacaaccaatagttataaatgtatttaaaagggaacgacacagttcccttgttatttacagatattctaaagaaaataatacttcaccatttgcacttcccccaactacgtccttattagttgcgatatattgcgcataaaaatcgagagaaatattattagttgtctctacagggtaaatcatactactttttcccggtaatattttattctgatttttatctaaaatagcaatacctatattttgagccgcatttttttctgccaacttaaacaaggtactatccttactgtcagtatcaccactaaacattacttttacaccgctagtaacaatactgcaatcagttaagttaagtgtaaactttactggctctgttgtatttttttgctgaaaatcttttgttccccaaacccctaagtcaacaaatttatttagcgaatcagggctgactctacaagtatttgccacaatgttcgcttttataacaatatttgtattagctaattctgctgttgcatctttagtaaaaaatactgtatatccgctaaaaagtagcattccccataatagaaagcgcattatttttctagtatgtaataactcattcatgatattagcctattaaaattaagggaaatcaactcttagaaagccacttgatgtgacagcgccttcagttggtgtttttccatcaatacttacgggataaacattaatcgtgacattagcatcagcattttggttgagtctgaaaggaataaaacttgataaatcattaggtgttaattcagatccacttgaattagcaaccacaaagccaacacttttattattagaaacaatagcattaccttgaactgaatctgcttgtaatcgcattgttaaatcagcactggcatctatattgtcacattgaatacttaagtttctagaaaccgtattaactccttcggcttttttccctgctactttaaaacttgatgcaggaatattgtcaaaatcaatattcaacacttgccctgaattaataacgcaagattgtggaactgtcattgaaagatttaaaaatagctttgtaatgatagtttgtttagtcgcacaattctgtggttggcaaaaaccaaattcgcctacaaaaatattttttacataggtaccagaaataatagccttgtcaatttttattctggtttgatactttcttacagaaacgacgctttcttcgttttcagtataagtacgggaaccacaagtagagcttagcgtaggtacattataagggacataaattgttctacaattattagtcattcttaacgcaacagaaatatagtcatctatcttagaataaatccagtcattattgctggtatttgcactaggaatattaccattggaatatgtcgcccatgtttgcgcttgtcccgcattccatcttaatgtaattcgattggacaaagtaatatcagaagcatctttagtaacaccgactttattttccgtctttgatagttgtccactaagcgtggaatattcattcgcattacaaccactgacacagctcacagcgactgcattatttgaaataatggctattattgtaaacaatactattctaatcataataaaatccgtaaatatgcttgtttttaatattggcatgtggaagaaataaaatagatacctttttcttttgatgacttctcattaatttggtaatcaaatatacattgttgatcagccatttttccccattttgcttttagcctaccaacaggtgctaaaccagagataaaaacattcccattatcgccaacaataccacttacggaacgctcttcatcaacaaccatcgcaccgaaaggtataatagcgccatcttttttgcttaatgtaaccattgctcgatagccaatattcgttttaaaattagcttcaaccaatgcccctttagtaggaactacattaataatcgtattttctaattcaatattttcttctaatgaattaacatctaatgaaactcgattatttttatatgttgaagcaaacggtaagacagcataaccattattatcagttaatataccatttgcattttctactttaatattattagcatcatttgctttaataagaatattggtatcccctaaaggttgagttaaagtaatacctcctgcatgagcaacaataccaccatttaaactataattaaactcatgccaatcattactataattatatccgctacctatattagcatatttacctttataattagcataaaccattcctgaataaccagaaccattatgcgtatatccttgttgaatattataatttaaattattgtcttcaaggagagttcctgttagtcccacttgattgacccaaacattgtcatcgcttctattcattgagtaaacagcatacatactatttctacttgaatgtaagtcacttacagtttgttggttaaatacatcattaagaggaattgatatattaaaagctacatttttattatcaccacgcatacccggtgattttaatttcgataaactaagactataatttatcctatcaatattagcattataacccagttgccataactgttcagtttcagttgtgcgccaatagttttggtaagagcctaaaatatacaaagaactattattggtaatttgctgatttatattaagttgaaacctcccttttttagaataatttaaattatagtagttagataagttatcctcatctcttattattccattatctgttactatttcacgccctgccatttttttataactaacttcatttagggtatagtagccttgcgttgaatatcgataccccattatttgaaagttagtgcctgtgctattaatcgatttagcataaagtaatcggaatgactgcccttttttatgctcatcgtttggcaatatactattcgcctgtattacatctgctgatatcgccccaaaggtgcctagattaccacctaaaccaatcgcataggcttgataattatttgaaaattggcttcctccatataacgtcatattataaggtaagccatatactaaacttaattgaccaaaattaggtttatcttgataatctgctccgctacgaaattcccctccaatcaattcgtattttaagcgtccttcacgttgtaaaataggcacatttgaataaggtacaacaaattgtgtaattttaccgttattctctttgattgtgacatctaaattaccgctacttgatgtggcatagagatcttttatttcaaatgcacctggaggtacagaaatttgataaataacaaaaccattctgcttgactgtaacaatagcattgctattcgcaataccctttatcgtaggtgcaaatcctctcatgctatcaggcaacatattatcatcagattctagcttaatccctctaaaaccaagactatcaaaaatggttccattagaaaaagagtcaccaagggttaattcagcacgtaatggaataataggtttttgtacatatgttcttatattcctccatttattttgcttactttcaccactggcatagttccatgaactttcatttctaaatcgccatgaaccaagattaataccaggatttaagtttaaaaaataattattattatcaacgttatccttaaagttcttactatttcttcctgtgaaattataatttagtaaaaacgcattaatcccattatcccatttttcaggtgggataaagccacgaacattatttttaaacattatttgtggaatacttaaaaataatttttgtccttcaaaatcgaatttaacacttgagttttctattttatctaaaatattctcacaagcactatctttactttctacctcttctgatttctttttgctattttcagttaaagttattccaaaatttgtcaaagttttattatctatacaaggtaataaacctgtatcatcggatgatgcatcgctttcataaaatattaaattttttgtttcaacatattcatcgtttacataaatttctactgaatacattccttcaggttggccttcacctttatcaaatcgagataaatctgctacttcattatcaatatttgaaattaagttaggattaaaaaaactatccgcatacaccacaccagaaaagcatgtacctaaaaagatatataaattaaaacatatagttttagattttagcataataaagccttatcattaatgaatgttatagcattacttaccaatctgtttcgttactttgggtgtactagcaccataatcattaatagtttgataagatatttgactatagttaggcttgctgactttaatcattactgttcccataggaggaaccataatactatttagctgttcattatcagcttctaaattaattaatgtcgcataataaggtgaaggattatttactattatgtttccttgtgattttttaaactcaagactattaggtacatcctctatgttaaaatttaatccttgaggtctaataaaaatttttattctagataatactgctagctgtaatatatttttatcttttatttcttctcgctcaatttcagggattgcttttgtatttaaccagaacaaactttctctatcatttggtaatgccttaccagcataaattattcttagcttgttttcactttctggtttgctgacaaacagtggtggtgtaacaataaattcattacttttttgatcttggctatcatcaatccatgattgcactaaaaagcgtaatcttttatctgtattattaagagtaattgacgtctgttttgcatccataggatagactatgcgtgttgcagctaatgcaacacctcccgcatatgatagcgatgaaaaactgaagagaaaaaataacgcaataaagtgtttagatattaaatgcatattaacctcaaatgataggtttatttattgataattgaaaacaaaccaaactacgctgtcagcttttccaccgataacgttttctttcgttgccagataacttgctttaaattttagttttaattcattctcttcaataaatttatacttattgaatttattaggaataattatttcaccttcatcattaaataatgcaacacctaatcctgaagctgaattttgttgatcggtgatgctaaataatcgtttatcattattgtttacatcacctataataattatactgactttatccgtaatacttttattacatcccattaatttaataaaaaatgggatttttatagagtgacttcctactccatgaaattggttactactaataacaccaagatcaacaatttgatattcactttcagaagatactgtacaagcaggctctacaattccccctttaaaagtcacaataccatcgtctaaagaaatattttccctgtcattagaataggctgtaaatgaaagagtaaaaaataggacaatagaatatattaaactatatttcatatttccctcgatataaaagtatgacctttatcaggtcatactttaaattaatccaatttatttattcatattgcattttgaaagttacatcagcatcagcatgaccaggggtaacggtatctaatgtagatttataacgtgcaacaaagttaagtgtatttgatccatcaattaactgttttgctgtagaaaaaacagagccgtctggtggtaacacttttcctgtatggtctgtaatttcaataccaacgcccgtcgcagcacccgcaccacctgttgtaatattgcttacagctaatactgttttatcatttgaatcacttacacctgaaaatgaaactgaggcattttgtgcgacagtcgtatcacaagcttctaaattgatataaaaatcagtattaccaactgttttccctacactatcaaattgtgcggtacgatattgtccaatattaacagtttgatctattgattttgtactaacaacacatgcagcattaacaatttctccagtaaaattaattttaccaccattaacaatagtcgctgcagaagcaacaccgctcagtgataaaacagatactgtaaatagagctttaactaacatcttttttttaagcattgacttttccttttacattacaggtaaatatacacaacaacttcacttataaattaaaatagtaaatctatattagataacaatatttgaatccatatactaattatatgataaagtgttaactgccttaataagggtaatttaataaacattaaataaatagggttttaattttaaataaaatccctattaattcattgatatacttaatatacttgccaccaataatattatttatcttacatttaaataatattctcaaagaatggaatattattatcagaatcatattttattttatattttaatgtgataactcttttggaaaccttttcaaagaaatcacttattgaaatatcaaatatatttagtatgtgaaaaagtatatcaataggtattttatttattcctcgttcataacgagaaatttgttgttgagagatattcaataattttcctaactcagcccccgtcatagaattacgttgccttaaaagaaaaagttcatatccaatcgaatgacaaaatatttttctttctgaaatatattcaaaattcaatgagaaattatttatttccaaaattcacttcctcaactgtatttgcatttaatttactttatgagattaataaaatcaattattcaaaaatttctaacgaattaaaaacctcataataaaacactaaataagagtaggtaaatatactcattttatttgtatcagggagttaattgattatctgatttgaatagtcgttttaagacagtgattaattctaaaattacgagaaaatagacacaaataagacataataatctattaatgaaaacatattaaatttttattaatttttaatagaaatattttttattgtttttgcttactgtaaaaccaagggttagtacaaaacttatactttttgtttcaaatgttattttaacaaagttacaataataaactttattaatgattatacctttatatctcatcctaaaaatttttacttgatataaattaatatttatttattttttttggtactgatatttgtaattagataagtttttttaaccattattttatcttattaaaaaataatatttttataactataaaaacttttgatattaaaatcataaactgataaaaacaacataattcattgataataaatgattttcatcattatcaacacttttcatatttaaaaaaatgataatatcaaatagaaaataaatttttagaaaaaatctattacaaataagtttatttgaatattaaatttttgagccatatgctttatatataaagaaaaagggcctgaataaattcagacccttttttctattaatataattttattatttattaaagcggatcgacttttaaacaagataccgcatggcggaaacttccctctaataaggggcgcgttttagcacattcttcatcagccatcggacaacgtgtacggaaaatacagcctgatggtggattaattggtgaaggaagctctccttctaacaaatcaatatgcttgttacgctctttatccggatcaggaataggcaccgctgacatcaatgctttggtataagggtgtaatgggtgatgataaacttcatcataagtccccaattccaccgcatgacctaaatacatcactaagacacgatctgagatgtgtttcactaccgcaagatcatgcgcaataaagatgagcgataatcccatctctttttggatatctttcagtagattgactacctgagcttgaatagaaacatccagagccgatacaggttcgtcacagataaccagttttggctctaagatcagtgcgcgagcaataccaatccgttgacactgtccaccagaaaactcatgaggatagcgattaattaagtttggtaataaccccactcgcatcatcatcgctttgactttttcaaccacttcagcctgtttcattttcggatgataggtttttagtggttcagcaataatatcgccaatcgtcattcttgggtttaaggaggcaagtggatcttggaatatcatctgaatatcttgacgaacatcgcgccactgtttattgcccatgcctaataagtcatggcctaaccaagtgactgtaccacccgatgctttaactaagccgataatggcacgcgcaaaagttgatttaccacaacctgattcccctactacacctaaggtttcaccttcgtataaacgtaaggtaacaccatcaacggctttgaggctttttttaggttgccagaaccactgcttattatcttgtacatcgaaataaacttttagatcgttgacttcgaggatcacttttctatcttgtaaggtggcttggctcatactaactcctccgccgctttaaaacaggctcgtaatcttccctgagcaaattgtgttaattgaggttcactattcaaacactgctctgttgcatattggcaacgaggctggaatgggcaacctttaggtaaacgcaataagttaggaggattacccggaatggtcgccaaacgttcatcttcaccatctaaacgaggtactgcttgcagcaatccaatagaatatgggtgtgatggttggtagaaaatatctcgcgcattaccatattccatggttcgcccagcatacattaccagtactttgtcgcaaatacccgcaaccacaccgaggtcatgggtgatcatgataatggctgtattaagctctttttttagctcgtttagcagtgtcatgatttgtgcctgaacagtcacatccagtgccgttgttggctcatcagcaattaatagttttggcttacataatagtgccatcgctatcattacccgttggcgcatcccaccagagaactcatggggatacatgcccatacgtttatgggcttcgggcatttttactgcatcaagcatgcgaacagattccgcatatgcatcatttttactcatacccttatgaagcataagcacttctattaactgagtgccgactttcatataggggttaagtgaggtcatcggatcttgaaatatcatggatatttcttcagcacgcattttgtttaattgactttggcgtaagtttaaaatttcacgaccattaaaatgagcacttccagcagtacgaccgtttttagctaataatcccattaaggcgaacgccgtttgcgatttcccagagccagattcaccgacaattcctaaggtttcccctgcagatagctcaaagttgagcttatttactgcggttacatccccatctggagtaccaaaggtgacacagagatcttttacacttaacaatggcttatttgttgaatttgtcatcatgttctccttaacgatctttcggatctaacgcgtcacgtaaaccatcaccgataaagttaaagcaaaacaaggtgacaactaaaaatgcagctgggaaaagtaataaccaaggagaaacttccattgaatttgcaccatcactcagtagtgctccccaactacttaatggctcttgtgtgcctaatcctaagaaacttaaaaatgattcaaataagatcatgctaggaaccagtaatgaagcgtataccacaacaacacctaatacattaggcacgatgtgtttaaggacgatattacgtgatgacacaccacagactaacgccgcttcaataaactctttacgttttaaactaagtgtttgtccccgtacgatacgagccatatcgagccaagataccatgccgatggcaacaaagatcagtaagatattttgcccaaaaaaggtcaccagtaagataacaaagaacataaatgggaaggagtttaatatctccagtaaacgcatcatcactgagtcaacgcgcccaccgatataacctgccatcgcgccatagagggtgccaacaatcaccgcgacaaatgccgctgcaatacctaccatcagtgaaatacgtccaccaattgctacacgaactaataagtcacgtcctgatgagtcagtgccaaaatagtgcgctgaggcaaaatcaggtggcattgacatcatttcccaatccgtatcgtcataaacaaaaggcgataacatgggggcgaaaatgacaaaaagtaaaatacaaaatagtagtactaggctggtgatcgccgctttattgtgcataaaacgacgacgggcatcttgccataaactacgaccttcaacatctagctgctccgagaaattccccagagcttcgctattttctttcatcgataacataacgtgctccagtctctattaataacgaattttcggatcgattacggcgtataaaatatcaacaatggcattaaataaaatggttaaaccacccacaataatggttaaactcaataccaatgagtagtctcgatttaatgcaccattaacgaaaagttgaccaatacccggtaatccaaaaatggtttcaatgaccatagagcctgtaataatccccacaaatgccggccccatataagagatcactggcagtaatgctggttttaacgcatgacgtagcactatgcgtttcattggtaagcctttagctttggccgttctgataaagtttgagtgtaaaacttcaatcatagaactacgtgtgatacgcgaaatacttgcaatgtaggagagcgataatgcaaccatcggcagtaacatgtactgaatttgcccaccattccaacctcccgccggtaaccaacgtaaggtaatcgcaaagataagcactaatagtggcgccaccacaaagctcggtatcacaacccccgtcatggcaaatgtcatgacggtataatcccatttggtattttgattcagtgcggctatcacgcctgcccccacaccaaaaataaccgctaatacaaaggccgatagccctaattttgcagaaacagggaatgctttaccgactaaagtgttaacactgtagtctttatatttaaaagaaggccctaaatcccctttcgataattgaattaaataatcgaagtattgtttgtaaatgggatcgtttaaatgatatttcgcttcgatgttggccataacttcagggggtaatttcctttccccagtaaaagggctacccggcgctaagcgcatcataaagaacgaaatcgttattagaataaaaagtgtcgggatcgcttccaaaaagcgacgaaaaataaatttgagcattgcccgttcctataacacaaacctattcaggcgtggtgataaaaagacctcgcttaacttaagcaaggtctcgcccgattatttagcaataatatacaagtctttagtatgtaaattatccagtggatctttaccagaataaccaccgacataaggtttaaccaaacgggtgtttacgtagtagtaaagtggaacaatggcagaatctttatctaatacaccttctgctttttgataaatttctgcacgttcatcatccgatttcacgcgtaaagattctttcatatacgcatcaaattgtttgtttttatagtgaacggtattattactgctgtaagacagcatcatgttaaggaatgaagaaggttcgttataatctgcacaccatcctgcacgtgcaacatcataattaccttggtgacgtgtatctaagaacgttttccactcttggttttcaagagaaacctcagcacctaagtttttcttccaaatagaagaggccgcaatcgcgacttttttatgtagatcagaggtgttatacagtaacttgaattttaatggattggctttgttataacccgcctcttctaataattggcgcgccttttcattacgttgctcttgggtccaagaagcgaaccactctggtttactctctttaatgccatcggtgaaaggcggtgtaaatccgtaagcagggatatcaccttggtttttcactttataggtgatgatatctctatccatagatagttttagtgcttcacgtactcgtggatcgtcaaagggagctttctcattattaatttcataataataagtacataagtatggactgatacgtaattcatctgggatctcttttttcaatttttggaaaaattcaatcggcagattgctataagtcatatcgatttcacccgcacgatagcggtttacatcggtgacttctgatgagataggtaaaaaagtgactttattgataaccgtatttttattgtcccaataggttggactacgctctaattcaatacgttcgtttaccgtccaatttttcagtacataagcaccattgccgacaaagttcgcaggttgcgtccacttttcaccaaatttttcaatcactttttgattcactggcgacatcgaggagtgagctagcaatttaggtaaataaggtacggcctctgataatgtgatttctaaggtattattatcaagcgctttaacacctagttccgtcggttttttcttaccggcgataatatcgtcaatattaacaatatgggcatattgtagataactttcataaggtgatgctgtattcggatctgctaaacgttgccagctataaacaaagtcttgcgctgttacagggtcaccgtttgaccatttcgcgtcttcacgaattttgaacgtccaaacagtaaaatctttattttcccagctagtcgcagagcccggtagaatttcaccatcaggccctacaatcgtgatcccttcaaatagatctcgtgccaatgcagattcaggtacaccctcaattttatgaggatcaagtgattgtggctcagagccattattacgcactaactcttgtttatcagccagttttaccccatcaggcacaacagccgcagtagcattgagcgccgtaaaaccaaagatagtaccaatggcgatcgctagcgcactttttttagttacatttatcatcttatcaaatactcccagttagtgagtcggccattgttcggccttcctgtgatgcttcgctgtgtttttggaacgttttacacaacttattgttttacaaaaaataaaatattgttgcggattgactatctatgcttaactgcatgatgtctttatcatttttgtgccgttatattttgtgtagtactttttatgctgtacttttttaaattgcttttgctaattaaaatcagatatagctatagatgcgttataacttaccagttttatttatctgcctttataaaatagcgctttaagtccgtataatcaaaggggtctttaccggtaaatccgcccactttaggactgaccattctgacactcacacgataatagactggtacaatagcggagtccttgtctaacaaggcttcagcacgttgatacagttggtgacgcgcttcattatcagtggccagtaatgcattctttaatgcggcatcataatcactattttcatataaaatagtatttagactgctagtggagaggaaagagtttaaaaatgatgttggttcattgtaatcggcacaccatgttgcccttgctacttggtaattaccttggttacgattttctaacgtcgttttccactcttgattttgtaaagtgacattagcaccaatattctttttccacatagaagcggcagcaatagcttgttgcttattctgatcggatgtgttgtacaacaatgtaaaagataatgggttttggctgtcataaccggcttcttttaataattcacgcgctctttcatgacgctgttgttgcgtccaacctgcccatttagggggtttaaacttgccattattaataaaaggtggagtaaaagaataagccggtatttgcccttgccccatgatcttttccgcgataatttctctatctaaacttaattttaccgcttcacgcacacggggatcatcaaaaggtggacgtttattattaagctcataaaagaaagtacataggtaaggcgtaacatgtagattctctggttgctcttgtttcatctttcgataaagcgtaggaggaatagcgctattggtgatttgaacttcaccgctacggtagcgattaatatcactggtttctgaactaataggtaaaaaagtcgctcgttcaataatggtgtttttgttatcccaataaagtggattacgttttaaagtgattttttcattaaccacccaattatcaattaaatacgccccattaccgacaaagttttccgggcgagtccaattgacaccatatttttcaacaatctcttttttaactggttttaatgaggtgtggtttagcatatccaccagatagggaaccggttgtgtgagcgtaacttgcaaagtatgtggatcaattgcttttacccctagactctctggggatttcttgcctgtcagaatatctgcaacattttccacataggcatattcaagataactggcataaggcgagccagtttggggatccgttaatcgacgccaactataaacaaaatcatctgcagtaaccggtgtaccatcactccatttcgcatcatcgcgtaaatagaaagtccatattttattgtcttctgagctctcccatttagcggcaacccccggcatactttcgccattaggccccatataagtgagcccttctaataaatttaaaataatattactttctggtaccccttccactttatgtggatcaagggaggaaacttcagtgccattattaataacaatatcttgttgtttcgcaagaagagtaccttctggaggtattaccgcatgagaaagaaaagaggtcagcgcaagtgatataatgctgacaggaaacatcatttttaacataactttctttttcatgggtacctctcctaataaataatcatctatagcggggttactcaatttacatataaattatttttaaataatattcagatatttcatgctatttaatatgttgagataattgttagataaaattaataacaatattcttcttttttacacttatagtgaattttgtcaattagtgcggtgttattatcacttaaactttactaagcccagtagacttctatcttatgaaaaaagaaaattctcatcacgctatctacaacaacaaataaacatttaattaacaccgcgcaacttttatagatagaaaacctacatagctcacaaaattaatataatcagatgggtttttagcgaggatacagaactttatgatgtgttcggtgtaagttttttttcacacaacttgattataaacaataacaaatctgtctttaaatgacagaaactggctaatctaaaaataacggtagattaataaaaaaacatttttattatttgtttttaaaaattaatatattttttgaaatacaattaaaatcagtactattttcatttatatcccgatgaattagcaaaaaaatatcctttatcgttgttatgaaccataaaggatattctgagcgttagcctacttcttcaaaatttttgctttaattggctaaagtcgtaccaaaccattgtagcttttgatttaaactgacgacttcaccaacaataattaatgcaggacttttcattgagcttgccatttcagttagttgctgtaattgaccaacaaccactttttgtgtcgccagtgtacctttttctactattgccactggcatagtggcacgcatatgctgattaagtaacatttgctgaatgtaatcggctttacttagccccatataaaaaaccaaagtttggttatcttgtgcgatacattgccattgtgcgtcgttcagcccttttccatgcccagtaataaaacgcacactttgtgcataatcccgatgtgttaacggaataccggcataagtggtacagcctgatgccgcggtaatgccaggcaccacagaaaaaggtatttgatgctcaattaaagcttctaactcttcacttcctcgaccaaaaataaaaggatcacccccttttaacctcactacccttttccctgccttagcgtgattaataagaatttggttaatctcctcttgaggaacacaatgaaaaccagctcgtttaccaacataaatacgttcagcatctctgcgcactaaatgcataacctcatcagagactaatctatcataaaccacgacatcggcttgctgacattgttgcagccctttaatagtcattaatccagcatctccagggcctgctcccaccaacaccacactcccttggggttggttattttccgctagcaatgtgctgatacgttgttgaataccgttatctctacctgcatcaatttccgcttgtagcgctttatctgcaaaaaaacgctcccaaaaatagcgtctagcacccatggtggcaaaacgttgtttaacttgctcacgtaatttccctgctaactgcgctaaagcgcctagcgagttgggcaaccactgttccattttttcacgtaagatacgtgcaagtactggggcttttcctcccgaagaaattgcaaccataataggggaacggtcaatcactgagggcataataaagctagcttgcttgggcgagtcaaccacgttacaaaaaatgcgttgttctgtggcctgctgatagacgagttgattcacttgctcattatctgtggccgcaatgactagccatttgtcagctaaatcagcaacactaaattcagccgtgaaacactgtaatcgttgctcgttttgccactgcataaattgtggtgtgaatgtcggtgcaacgacggatataaccgctcccgcttccatcagtaaacgtgccttacgctctgccacttcaccgccacctactaataaacaaggtttattgttgagctgacagaatattggaaaataatccatctgggtcccctatttattggttttatcaatgacgcgaacgcacactgacggtattgccttcgactttgacttcataatgagtaattgaatagttctcatcttcaaggcaataaccatctgttaagcgaaaatgctgctttttcagtggactgacgatatataactcattgtcatgctctgcaattaatccccgtgataaaacactcgcttgcgcgaagggatcaatattacttaatgcgtagagccgttcatcttggtatggacggaaaatagccacctgatcttgctccaccagcgcacaaacgccagtccccacagtgatgtcatctaattggcaaaccgctatccattgactcatgattgcgtctcctctgttaccattttgatatcaatacgttcatgcacgcgggcaggacgatgctgagcacgctcttttaccatctgtatattaggatcgggcatcggattgttaataaagtgcacaaaacgtttcaatgcttgtggtgaatcaagggtttcttgccactcacaggctacgcgctcttgtaaaactttaagctctttttctaactgtgcatttaagcctaacttgtcgtgaataatgacctcacgtaaatattcaacgcccccttctaggctttctaaccaaacggaggttcgttgtaatttgtctgcaatacggatatagaacatcataaagcggtcaatataatggatcagcgtttcttcatctaaatccgccgcgaatagatcgccatgacgtggtttcatgcccccattaccaccaaaatagagattccagcctttttctgtggcaataatccctacatctttcccctgagcttcggagcattcacgggtacaaccagataccccaaatttcattttatgcggcgtgcggatccctttataacgatgttctaaaaagacacctaatccaacactatcgccaaccccaaaacgacaccaactgtttcctacacaagtttttaccatacggatcgctttggcataggcatggcctgtttcaaaacccgcggcaattaatttctgccaaatcgccggtaaatcttgcttctgtgcaccaaacatcgccatacgttgagagcctgtgattttggtgtataaattgtattcttgcgcaatttgtccaatcgcaataatacccgctggcgtaatttcaccgccgggggagcgtggaataatagagtaagtgccatctttttgcagattggcgaggaagttatcattcgtatcttgtaacgcaactaagtcatcacgcaagatatagtcgttccaacacgaagccagcagagagccgacggtcggtttacaaatttcacagccatagccttgaccatgttttttcaatagttcatcaaagcttttcagcccttcaacacgaataagatgataaagctcttggcgagaatagtgaaagtgttcacaaaggtgatggttaacttcaatgccttgttttgtgagttccgcatttaatacttgagtgataagcggaatacatcccccacaccccgttcccgcttttgtttctgctttaatcgccgcaaccgtatgacaacctcgttcaatagcttgaataatgtcgcctttgcttacatcaaaacaggagcaaatttgtgccgtttcaggtaatgaatcaaccccgattgccggtttacttccagcatgagcaggtaagattaatgtgtcaggatgttctggtaattcaattgtatttaatgctaactgtaacagattgccataatcttccgtgtccccaaccaataccgcacctaataggtatttattgtcttcactcactatcaggcgtttataaatctctttaccttcatcaagataaatatagctacgacaacctgcttggcgaccatgagcatcaccaattccccctacatcaaccccgagtagttttaattttgcacttaaatccgccccttggaatgctgtctgttgacctaatagatgatcaacggctacctgagccattttataacctggggcaactaacccaaatgtttggttatgccaagaagcacactccccaatggcataaatatctgcatctgaggtttggcaatagtcattaatcacaattccccctcgtggtgctatatcgagagaacattggcgtgctaatttatctttcggacgtataccggttgaaaatacgacaaaatcaacctcaagtgaggagccatcggcaaactgtaatgttttacgcgcattttcccctgtcgataagatcgcttgggtgtttttcgctgtgtgtactttaacccccatgcgctctattttacgtttgagttgctctcctcccatgctatcaagctgttctgccattagcgttggcgcaaattcaatcacatgggtttcaatacctaaactttttagcgcaccagcggcttctaaacctaacagcccgccgccaataaccgcccctttacggcttaaacgagcacaagcttcaatcgcatttaaatcttcgatagttcggtaaacaaaacaatctggtgagttgtttccattaataggaggaacccatgggtaggagcctgttgccatgatcaatttgtcgtagctaacacaacgcccggtattggtgtgcaccactttttcttcacgattaatggtgatcacacgctcacccactaatacttcaatatgatgtttctcgtaataaccgggtttaactaacgagagctcttcagcggtgtgatgagaaaaataggaagagagatggactctatcatatgcaatacgaggttcttcacaaaagacgataatattgaacgtttcattgccgcccttatcaatcaattcttctatataacggtgtccaaccatgccgttaccgatgattgcgagtgttttcttgctcatttttgcctcagatctaaaggtatctaaggttaaaatacgaggctactcataagagatattgatgaatatcaaatacagcttaatcaattcagccaatacaacttaatagtcaacatattactaccaaagtagtattttattcgtcgtttgttgcgatgaattattcctcaaccataattaattcaaaaggcttataacgaggtgttatatataagtgtaataaaaactttgcgaaatgcgcttattttgcctaagttaatttccaaaagtaataactaataagttattgacataataacgaaagcgagactatttcagggagcgtccaatgaaagtgaaaaccaaattattatcattacttgtgatgggtgctctcagtgcccctgtattggcagcaacacccgccaatacattgattgtagtacaaggccttgatgatattgttagccttgatcctgccgaaagtaacgaattatcaagtattcagaccgtaccaagtttatatcaacgtattgttcagcctaaccgtgacaatccagaaattaacgagccaattttagtcgagagttggcaggctcaccctgaacaaaaatctatcgtctttaaaattaaacaggatgcaaaatttgcctccggtaatagcgtacgcccagaagatattatcttctcttaccagcgtgcagtgacgatgaataaatcccctgcttttattttaaatgtgctaggttggaaagcagataatattaataccctattgaaaaaagtcagtgataaagagattgaagtacgttggacagcagatgttagccctgatgtggtacttaacatcctttctacaccaatcgcttctattgttgatgagaaattgattgccgcacatattaaaaataatgactttggtaataattggctaaaaatgaattcggctggtagtggtgcttataaaatgcgtgcctacaaacctcgccaagccattgtgttagaagctaaccctctttcaccgaccggtgcgcctaagatagccaatattattatcaaaaatgtgcccgatcccgcttcacgccgtctgttaattgaaaaaggcgatgcggatattgcccgtgacttaggtacagaccaaactgcagcattagcaggtaaaccgggcattcaaattttaaatatcccttctgctgagcaagtctatatggcgtttaataccggtagcggaaatccgcttcttagcaatccggcattttggcaagcagcgcgctatttggtcgattataaagggatcaccaatgacttaatgcgtgggcaatattttattcaccaaagtttcttaccggtgggattaccgggggcattagaagataatccatttagttttgatccgcaaaaagcgaaagatatcttagcaaaagcaggaattactcatgcacgttttactctcgatgtagaaaacaaagttccttacatcaccgttgcacaatctattcaagcaagctttgcacaagcgggtgtacaggttgatctgttacctgctgccggtagtcaagtttatagccgagtgagagcaaggcagcaccaagcggcgatccgtttttggatccccgactattttgatgctcactccaatgctagcgcttttgcctataatgacgggcaatcaaataccgtggcttggttaaataattggaatattcctgagttaagtaaacaaacactcgtcgcccttaatgaagcggataaggctaaacgtcagtccctttatactgaaatgcaaaaagagctacaacgcagttcaccttacgtgtttatcgaccaaggcaaaaatcagattgtattacgggataacgtgaaaggttatgctcaaggtctaaatgccgatatggtctattacgacaaagtcactaagtgatcattttcctgccgccactcacaatcatgttattgtgagtggtctattttttgcgatttcaaggctgttgccgtatgaatacactcacgatatccactcgcctaaaaagccagttgtttaccttggttcaaggtatattgacattggcgctaacacttttagggttactggttattacttttacgctttctgcgttttcccctgttgatcctgttttacaaattgttggtgatcacgccagtattgaaacttataatcaagtaaaacatgagttagggttagatttacccatctacatgcaatttttccactatgtagaagcactattgcaaggaaatttaggtacggcgacgtcaacgggtcaaccggtatttgatgatttaatcgccacctttccagccactttggaattagccactgtcgccttagtcattggcgctagtttggggattttatttggtgtgttatgtgcgcgttttgttggcaccccctttgattttaccttacgctttttaacgctattaggtagctcagtccctattttctggttaggtttgatattactccttattttttatgccacattgcaatggacagcaggcccaggacgtttggatgatatttatcaatttaccattgagcctgtaaccggctttgccttgattgacactctactggcaggtgataaagatgcctttctaaacgccctatcacatctcatattaccggtttctctgctagcctattttgcgctggcatctattacccgtttaacacgctctgcctgtttaaatgagatgaataaagagtacgtcactctcgccagagcaaaagggattggcgaattacgtctcttatttacccatgtattacctaatattcgcggtgtgttgatgaccattatcgccttgtcttatacagggatgttagaaggtgccgtattaacagaaacggtattttcttggccggggattggtcgttatctcacaacggctctctttgcgggtgataccaccgcaattatggggggcacacttgttattggtctatgttttgtgctgattaataatatgacagatatcgttattcgtttgactgatccgaggttacgctaatgtcactctcctttttaacaaaaatagcgcgttcaccttcagcgtttatcggtctgtcattgttgcttcttctgctactaattgccatttttgccccttggctagcgccttatgatccaaattggcaacacgctgcacaacgcttattagcccccaatgctgcacactggttaggtactgatagttatggtcgcgatattctttcacgcttaatttatggtacacgcccaatgttaggtttggtgggtcttgttgccttgataacactaccattagggctatttattggcattttatccggttattacggcggttggacagagcggattttaatgcgttttaccgacatcattatgtctatgccctccttaattttagcctttgcctttgtcgccatgttagggccgggattacttaacggtgcattagcccttgcacttacagcatggccggcttatgcccgccaagcccgtagtgaaattcaacacttacgtaatagtgattaccttgcagccgctgaaatgatgggaattaacggtattagactattatgggggcatattcttcctttatgtttaccgtctgccattgtacgtttagcccttaatttagcggtgatcattcttgctgcagcaggtttaggtttccttgggctaggtgctcgccctcccatggcggaatggggagcaatgattgccgaagggatgcccgttatttttgatcagtggtgggtggccgctattccgggtacggcaattttaatcagtagccttgcttttaacttattgggtgatggattacgcgatgtattaggagaaagccatgaataaagcccctttaatcgaagtcgataatctgtgtattgattttccacgtgctagagtggtgaataatgtctcctttcagttaggacaagagcggttagcgctggtgggtgaatctggttcaggaaaatcgatgacggcacgctcattaatgggcttagtgcgtaagccgggcaaagtttctgctgataaattgcattttatgggggacgatctcctcgcttattctcctaagcaatggaaccagttacgaggaaaaacaatatcaatggtattacaagatcctcgttatgcattaaacccagtgaaaaccatttatcagcaagtagaagaaacggtaaaactccatcaaaaattatcccataaagatcaacatgcattaattactgaaactttgctttccgtgggattaccggaacagagtatttctcgctaccccggtgaattatcgggcggtatgggacaacgcgcgatgatcgctattgcgctgattaataacccaacggtactgattgcggatgagccaacttccgcactagatgcacagctacgacatcaaatattagaacttatcattacccaatgcgcacaacgagatatggctttgttgttaattagccatgatctacctttagtggctgaatattgtgatcgtgttatggtcatgtatcaaggggagcaagtggatgaacttgaggcaaaagcattacctcaagccacacatccatacacccgcaccttatggacctgtcgccctaatgcgagtacctatggcacacaattaccggtattagatagaacactgaattttaaaggtacaccttatgctaattgatattcatcatttacgcgttcaatttgaacaaaatagacagattaagcaggtggtaaaaggtgtcaatctacaagttaaacaaggcgaaacctttagtttaattggtcgttctggttgcggtaaatcaactgtattacgggttatagccggattattacatcattggcaaggggatattaagttgttagggcaagcaattaagccacagcaacgctttcaaggtaagttacgccgtaacatacagatggtgtttcaagatccctatgcttcattacaccctcaacatcggatagaacgagcatttattgagccgttaaaaattcatcatattgcttatgataaaacaacaataacctcagcgttagagcaagtcggtttagaaggcgatattgcttatcgttatccacatcaactatcaggtggacaacgtcaacgtgtggctatagccagagcattactgttgcaaccacagttgttattattagatgagccaacctctgcactggatatgtcggtacaagcagaaattttaaatctgcttaataccttaaaaaaacagcataacatgacttaccttttggtcagccatgatgcagatgttattgcacatatgtcggatagcgcagcgctaatggaagagggtcaattgacttgctattatgatagaaaagcgctttctcaagggcttcatcgtcttgattaattaaaaatagccacaaaaaagataacaaagagagaaatgataagagcagtattaaatatcaatactgctctattggtaatattacactgtgcttatactaataatcccggaaaaatagaacgtaacccagtgacaataaattcaatacctaacgacatcaacaataaccccataatacgcgtgacaacgttgataccggtttgacctaagtatttaactaataaagtggcactacgaaacagtaaccaacaacaaaaagcaaaaaagatactggtcgcagcaagacctaagaaattagtcaccccttcccaacgtgaactccaaacaatacaggagctaattgcgccaggacctgccatcaatggcaatgctaaaggcaccaccgcaacactgctacgtactgctgattcatttttttcttggttattttgtttatcttctcctaagcgcccatttatcatggtcattgcgattgtcactatcagcatccccccagcgatacgaaatgagtcaatagagatgccaaaaatactcagtatcgaatcacctattaatagggaaataaccaaaataatcgcaacggagccattggcaattaagtttgttttattacgtcctgcatccgtttgataactcgtcatactgataaatacaggcaagatccctatcgggtttacaatagcaaaaagaccgacaaaaaatttaatataaccggataaatccagcagtgcccccatgaaaagccccttcttggctaataaacatgcgaattatgctctaaaagatagagtaactccaaaaaatgcgcgttactttaaatcaataaaccagttaattctattacttaacattattttggctaaatttttcgctagtaaacaaccataactccagtgatttaattttatatcctagagagtcttacaacaaaaaaatagtccatttatttttgtaattaattatcattaccatttaaacacttgctgaaaggtgtcagcttgctattattgtgatgtagatcactttaattaattagaaagatgataagctgtcatcattcagaaaaaggagatctttttaaaatatatttgtatttgttattgttttttcttagctttttaagcaaattagagcttctaataataatgacttaaataagtatagaaattttgatttgagctattcttatttagtgatgattttaccggctaatttgcttaaaaagtttaacattttatcaggagtctctttatgtctgtaactaacgttactgaactcaatgatctggttgctcgtgtaaaaaaagctcagcttgaatttgctaacttttctcaagaaaaagttgacgcaatttttcgtgctgctgcattagctgccgctgacgcccgtattcctcttgcaaaattagctgttgaagagtctggcatgggtatcgttgaagataaagtgatcaaaaaccactttgcttcagaatatatctacaatgcgtataaggacgaaaaaacctgcggtattttgtctgaagatttaacctacggtactatcactattgctgaacctatcggtattatctgtggtatcgtgccaacaactaaccctacttctaccgctatttttaaagcattaatcagcttaaaaacacgcaacggtattattttctctcctcatccacgggcgaaattagccacaaaccgtgcggctgaaattgtgttaaacgctgcaatcgccgcgggtgcaccaaaagatattatcggctggatcgatgaaccttcagtggcattatccaatgcattaatgcaccatgatgatattaacctgatcttagcaacaggtggcccaggaatggtaaaagccgcttacagttcaggtaaacctgctatcggtgttggtgcgggtaatactcctgttgttattgatgactcagcagacattaaacgtgcagttgcttctattttgatgtcaaaaacctttgataatggggttatttgtgcttcagagcaatctgttatcgtcgtagacagtatctataaacaagttcgtgaacgtttcgccactcacggcggctacatgttaaccggtaaagagttaaaagctgttcaagatattatcttaaaagatggtaacttgaatgcggccatcgttggtcaaccggcagtgaaaatcgcagaaatggccggtattgaagtgcctgttaacactaagattttaattggtgaagttaaagaaactactgatgcagaaccttttgctcacgaaaaactatcgcctctgttagcaatgtaccatgcacaaaactttgaagatgcggtacataaagcagaaaaattagttgaaatgggcggtattggtcatacttcttgtttatataccgatcaagacaactgtcctgaacatgttgcctactttggcgacaaaatgaaaacgtcccgtattttaatcaatacaccggcatcacaagggggtattggtgacttatacaactttaaactcgctccttctctcactttaggctgtggctcatggggtggtaactccatttctgagaacgtagggccaaaacaccttatcaacactaaaaccgtggcgaaaagagcagaaaatatgttgtggcacaaacttcctaaatcaatttatttccgccgtggttgcttacctattgcactggaagagattgcaactgatggtaaaaaacgcgcatttatcgttacagacagtttcttattcaacaacggttacgttgatgaagtgaccaatgtactgaaaaaatttggtgttgaaacggaagttttctttgaagttgaagcagatcccacattaagtgtcgtacgcaaaggtgcagagcagatgaacagctttaaacctgatgtgatcatcgcattaggtggcggttcaccaatggatgcggctaagattatgtgggtaatgtatgaacacccagaaacacacttcgaagaattagcattacgctttatggatatccgtaaacgtatttataaattcccgaaaatgggtgtgaaggctcaaatggtagcaattaccacaacatcaggtacaggctctgaagttacaccatttgctgttgtgactgatgatgaaacaggccaaaaatatccattagcagactacgcattaacgccagatatggcgattgtagatgccaatctggtgatgaatatgccaaaatcactctgtgcttttggtggtttagatgcggtgactcacgcattagaagcttatgtttctgtattagccaatgagtattctgatggtcaggcactgcaagctctgaaattgctgaaagaatatctgccagcaagctatcatgaaggtgctaaaaatccggttgctcgtgagcgtgtccacaatgcagccaccatcgcaggtattgcatttgctaacgccttcttaggggtttgtcactcaatggcgcataaattaggctctgaattccatattcctcatggtcttgccaatgcgttattaatttctaacgttattcgttataacgcgaatgataacccaacaaaacagactgcatttagccaatatgaccgtccacaagcacgtcgtcgttatgctgaaattgctgatcacttagaactgtctgctcctggtgatcgcacagccgctaagattgaaaaactgttagcttggttagaagagatgaaatcttcattaggtatccctgcttctatccgtgaggcgggcgtacaagaaagtgatttcttagcgaaagtggataaattatcagaagatgcgtttgatgatcagtgtaccggtgctaacccacgttatccgctgatctctgagttaaaacaactgttattagattcttactacggtcgcgaatttaacgagcaccctgttgctgaggtaaaagaagcgaagcctgcgaaaaaaagcagtaagaaataatagcgctatctctgtattaacagattagccttcaatcttcgatgattgctttactataaaaccagccacaaggctggttttattttgtctatcaatggataacaataatgttctaatccccttatctctcaatttatttttcttccttgtatttaatatgacgtccagcaagatagatgagagagccgccttgtgattatcacttttaggtatacgttgctaaaacagcaccaatcgccctctccctcatttttatcaacatccatctctttattcagcttaaccgtgattaagcgcttaacgtgctttacagcgccttgatatctgattacctagaaatgaaaacgctaaaatttctcattgagttaaaccacacgacacaattattcttatgataaggtttatcacacaaaaatgagagttgagcaaaagtaggcactattaatgtaataaaatgaggtgcttattttttaataagcactttttaccgcaacaccataaaaaagagaaatatcaaaagattttgatctatcgaagaaaggaataaacttataaaaataaaatttcaataaaatattatcgaactcacttttgcttattaagcagtatataacattcaaagtaggggctatttgtatattttttatctaataaatactactttagtggtaattcacatgtttatatttggtctattaagcacagtttcctcttttttactcataaccaatatgaatatttagatataaacatttcacctgagccattaaatggttgaaatattttttcactcacaagcattttttctcttctttattcagttttattaaactataaataatggcgaagtatcaaatgtcatcatcttagaacatttgtaaaaatcaatatctacatcacaaaacaaagaacctacgtatatctgattacctttttattgattaaagataatgaaacggagaaaacgaataaatgtttctagaaaaaaactaacatttttttacattattgatgctattttcagttatgaattataaaatacagtaaatataaaacgtaacttctaaaaatagataacctttttttagtataacaagagataacatttatttagacgattatatttccccccctctattcccgcaccaattaacaatagagaagaggaattttgcattataactgttcaattcgtccttttaacgtagcctctgtataatgtttgcggcacactgaaacatatttttcattaccacctatttccacttgtgcgccgtctgaaagtactttcccatttgccgctaagcgtaatactttatttgctttacgcccgcagtaacaaactgttttaagctcaacgagcttgtcagcccatgcaagcaaataagcactaccagtaaataattcacctctaaaatccgttcttaagccataggttaaaacgggtatatcataactatcggtaatttcacaaagttgctctacatgtgctttagtcaaaaattggcattcatcaatcaaaacacaatgaataggctctttattattttcagctaaaatagcatcacgaatattcatatcatcactgaaaagcaatgcatcagcacttaaccctatccttgaggttacttttcccttggcaaaacgtgtgtctatcgctgccgtaaaaatcaaagttcgcattcctcgctcattatagttataagaagactgcaataaagatgttgattttccggcattcatagctgaataataaaagtaaagctgagccatcagctctctccttaaatagtgtgtattatcgcgggaagcagtttaacataaacaaacgagaagttatcaacgacaactatttatagcctttatttctataaaagatatagcgaaaaaagcgcaggatcactgatgaggcaaattttttgtttaaaaaataaatagccttaataggtacttaacatattaaccccgcctttgatatacagttattaaactatgaaagttactctaagcgcatttttagaaaaaaatccgttattataaaaaagtagacaacgttttctattcttttacattagcgctatcaccagttaaaagatgtatatcattactaatatttcctttattggcgaaagatgccccaacttttaatatttttttgtaaagatattcgttttaaaaaaagaaaatttacgtttggtttgtatttagctattgcagaattttaaatagcaatctattattagtattacatcagccaacaacatttatttgagaccaggaaaatgagcgaatctttaaaaatattaaataacatccgtactcttcgtgcacaggcaagagaaacttctttagaaactttagaagaaatgcttgagaaacttgaagtcgttgttaatgaacgccgcgaagaagaacaagcaatgcaagctgaaattgaagaacgtcagcaaaaattacaaaaataccgtgagctattaattgccgatggtattgatccaactgacctgcttgaagctgctggcgcaagcaaaactggtcgtgctaaacgtgcagcacgtcctgctaaatattcatacgttgatgataatggtgaaactaaaacttggacaggccaaggccgtacaccagctgtaatcaaacgtgcaattgaagaagaaggcaaatctttagaagatttcctcatctaatttaatgcatactctatttaaaatacccttttaaaaattaaaagggtatttttcttgtttagtcatttttattaaacgagcgtttaactttaataggctgatgaagcttttaaataaaaagggctttacaaatatagtgaatgtattgataaaattaattagttaattttataataaaaaaggagctttaaggctcctttttgtcttgtgcattatatctatgctctgattattgctggtaataatctacataccaatccacaaactgcttcacaccatactctactgcagtgttgggtgaaaaacctgttgtctgagctaaatcgctacaatcagcacaggttgaaagtacatcaccatcttgcatcggcattaagttcaatttagctttaatattgagtgatttttctattgctgtaataaaatccattaactttgtaggctgtccattacccacattatatattttataaggtgcagaacttgatgaagtttccccctgctctacggtccaatttgggttgggttgaggaataatattaattaaacgtaccacagaactgacaatatcatcgacataagtgaaatcacgggtcatatttccgccattataaacatcgataggctcacccgctaacatagctttagtaaatttaaatagtgccatatcaggacgcccccaaggaccatatacggtaaaaaatcgcagtcctgttgtgggtagctgatataaatgagaatagctatgagacattaattcgttggcttttttcgtcgcagcataaagtgacaccggatgatcaacactatcttctgtagagaaaggttgcttttgatttaaaccatataccgagcttgatgacgaataaatcaaatgcccaacgttatgatggcgacaaccttctaatatattaatatggcctacaatattagcatcgatatatgccattgggttttcaattgaataacgaacgccaggctgagccgccaagtgaataactcgatcaaaacggtgatcagcaaataattgcgcaatactcactgaatctgtaatatcaattttatcaaattggaagttatccaactgattaagtttagctaatcgtgcttcttttaagcgcacatcataataatcattgagattatctatcccgacaacatgataacccatttctatcaaacgctggcttaaatggtagccaataaatcctgctgcacctgttactaatattttcatattatactcaaataacccaattaattgatttctgcgctaaacgctatcatgcttaatatcacctcaattaacatcataacgcttaacctagtcaatgccgatatatatatcaatattagcactgtaatttatcatcttttatagcggtacttttaagctttaagccataaataaatgccgcaccacattataaaattaaaatgacagtgcgacactattaacaagataaatcgttaaattttgttactcaacacattaagcttgcagtgattttatccatttcgtgaactcttcgccaaactcttcgtgctgtaaaccatattcaacaaaagctttcatataacctaatttattaccacaatcgtggcttttcccttgtaggtgataagcttctacaggctctttttcaattaacattgcaatcgcgtcagttaattgaatttcatcccctgctcctggtgccgttttggctaataaaggccaaatgttttcagacaacacataacgaccaacaatagataaatttgaaggtgcttcttctttcttcggtttttctaccacacgagtaatgggtttactgtcgccaggctgtaaatgttctcccatgcagtcaacaatcccgtagttagatacttcctcttcaggaacaggctctactaaaatttgacttgcgccagattgttcaaaatgagaaagcatctcttttaaattaaccttagtcagatcagcactatatcggtctaaaataacatccggcaagataacagcgaaaggctcatcacccaccaaaggttttgcacataaaatggcatggcctaacccttttgctattccttggcgagtttgcataatagtaacgtgacttggacaaataccttgtacttcttccaacaactgacgtttaactcgtttttctaaaatagcttctaattcaaaactggtatcaaaatggttttcaatagaattttttgaagagtgtgtaactagcacaatttcattgatgccagctgcaatacattcattaacaacatattgaattaaaggtttatcaacaacaggtagcatctcttttgggatagccttggtggcaggcaacattcttgttcctagccctgcaacagggatcaccgcttttcttactttacgcaccactgatgacattactcttctcctacaaattaagtaccatgatattcctatgatgttatggtacatataaaaaaataatcgccagagtataccagctaatatctacggataaacagagcatcatcgcttaattgagattgttcttcatttatgtttaatatatgtgcaataacagattttatttaatctaaatttaacgtttatgtataggtgagaacattaaattaattttatggtgctgattccaaattttacattgccaatctattcccacacactttatttggttaatatataaagagtgtagtgttcctaaaggtataccactatttaaaacatattttttattctctgtttttatttcagctcgtagtcctgctgacgctaataatatatttttttccttggtgtggtaataacctaaaatcagcgggaatgatcctctcacccccatatcctcaagcattttattgattttattcaatatgttatacatactaggtaagaagcgtcttttctcagtagcttttaggaaacgattaaaaaccacccttaaaagcagcgcaacgagtaacccattttcttcatcattagagacgtcaacacagtaaaaaatgatttgatcttttgataaagtcgctatatcaaataacaaccccatttgggatgcatcatttaattgacgataattaacattatatcctgcgacaatttgtttaacttgcggttgcatctgtttaacaaaggattgaatataatgaggctgttctcgtaagttattccaaagaggtccaagttgtccccttgcaattaattcagactcaaaaaaacctggacataatacttcaatgaccttctgttttaacttagctaaattagttacgggcttaagaaaaacgtcctgagcgccaaagcgcaacatatcatcaatttcagccatgttgtcagtacatgaaatagcaataacagggaaagaccaatgacgctgctctagatgacataaaaaagtcggcccattcataacaggcattctgatatcacataaaataagatcaggtcttagtccctcttcaagtaacaacaatgcttggctaccattgtcagtcgcataaacgcaagccttttcgtgtgaaaaatactcagtgagcattgtgcgaaatacaacctcatcatcaataatgagaatttttttaccgactaaggctttattcattagtaatacccataactatcatttcacttgcggtttatttagcgttacattattagtttagttcaacattgacgtttattattcctaatcgctatttttctgatggggatcgtcgtataaaaatggatcaggacattaccttgtcaaatttatgcccctgcaatagccaattgccttatagtgagtgctgtgagccttacttattagggacaaaaaatgcccctacagctcaagcgttaatgcgctctcgctatagtgcttttgtgactcataatgcagatcacctaatcaaaacatggcacccttcgtgtcgtacaccttctttacgggatgagttaatcgccacgtttcccaatacacaatggctagggttacatattatatcggcacaagaaaaccctcgtgataacgaagcctttgttgaattctcagcttgctttattgaaataaatgctgatgataagcagtatctacatgaacgctctcgttttctaaaaatagacgactgctggttttatattgatggtgtacagcctaaagtaggacgaaacgatccctgtccttgtggctcaggccgtaaatacaaaaaatgttgtgaacacaacagaaaataattgcaaacacagaagtaaattaaaggatttatccatacatgcaacaccaaaatactcaaaagaaaatactacgtactatttgtccagatgcgaaagggcttatcgcaaaaattactaatatttgttataaacatcagctcaatattgttcaaaataatgagtttgttgatcatcgcactggacgcttttttatgcgcactgagctagaaggtatttttaatgatgaaacctttttagccgatttagatgatgcacttccacaaggctcacagcgagagcttaatactgccggtcgccgccgtatcgtcattatggtcactaaagaagcccattgtattggtgacctcttaatgaaaagcgcttttggtgatctggatgttgaaattgcagcagttattggtaatcacgacacgctaaaacaccttgttgagcaatttgggatccctttccatctcattagtcatgaagggttaacccgtgatcagcatgatgaaaaactgatagcacaaattgaccaatacaaacctgattatgtggtattagctaaatatatgcgtgtattaacccccgcatttgtacaacattacccaaatcaaattattaatattcatcactctttcttaccggcatttattggcgcccgcccatatcatcaagcctatgaacgtggtgtaaaaattattggcgccacagctcactatgtaaatgataatttagatgaaggccctattattactcaaaatgtaataaacgtagaccacactttttcagcagaagatatgatgcgcgcaggacgggatgtagaaaaaaacgtactaagccacgccctctattgggtgctctcgcaacgtgtttttgtctatggcaacagaacaattattttgtaggcttacccgttttaaattagtgtaactacgacacaagcctaaagtaacaagagcctgggatagttattttatcacaggctctttttattttttgttacacatccaagtcaatcactatagctttctatctaaaatcaatacgatatagcacaacagttaagcaaagcggatatttttaaagcagttgatcgctttttcttaaaatagcactttacacatctcaggtatttggtattattgcgcccgctgtcacggacagcaagacaatttaatgttggtgggatacccaagcggccaaagggagcagactgtaaatctgccgtcacagacttcgaaggttcgaatccttctcccaccaccatcttcaatactcttcactattttttcattccaattcttttattaaatcaacaaacctgttcaatatactcgagtgatatttagatttatagatataacaattataaatcagctccgtttgtgttaaaggtataaagcacagttgcttttcatcctcacttttaatcgggttttcatcagtaaataatagcgaatggtgagtttgaataaagtttaaacaacaatttaaatcatccatcaatctaatactgacaggtttaccctgatccgctatttcattttctaatttctttatttttgctgttttatataaagcgggatcacataaccaaatattttcttttagcaatgtattgatattctcttgtgctttttgtgctaagatttgttggcaacatattcctagatatttatttttaacttgatgtattaagctaaacttttcactaataattttatctgagcttaagattaacgtgtttccatcataatctggtatctcttcaaaattatctttcgaaaatctcatcatatttatatgtgaacaattcttattggctgcttgatagagtgctgttaaatattgacttttaccccaatcataataaacatgaatgctattattaataatgcccgatgtgtgtttttttgttatctctttttcttgcagataaagtgattttaaatcattatagagttctaacccttcttgcgttaaactcataccaaacttttcccgcttaaacaagcgcttccctagcacggcttcaaaatctttgattgatttcgctacaggtggtgtcgttcggttcatcacacgagcagctttacttaaggatccattttcaacgacggccataaaggcctctaatttacgagaaaaaaacataatccaccattcctttgctgtgttaaacaaaacaattaaattaattttattaatataaataaaacacatattaactgaaagaaatccatgcgaaataaatattatttttaattatctttacctcctataaatataatttataattcaattgatatttttattctgtcattttgctttacatataaaaaatgataatacttatattcttctatcaaagaatagtttatgtttctactttatttaattaatattttttgttaggcataaacttattaatattattagttgccatacattttgctatttggctacgatttatctatatcacgcgattatatctcgatgacaggtattaacattggcatgtaaccgacttacatttatttcattatcctgttagtataagttatcctattattcaatctataaatggttatagtcacatgaaatttgtctcattcaatattaatggattacgtgctcgccctcatcagctcgaagccattgtagaaaaacaccaacccgatgttattggactgcaagaaacaaaagttcatgatgatatgtttccattagaaactgtcagtgccttgggctaccacgttttttatcatggacagaaaggccattatggtgtggctttgttaactaaggcgaaacctgtcgcggtacgtaaaggattccctggtgatggtgaagaagctcagcgtcgtatgatcatggcggacattgaaacccccgctggattattaacggtaatgaatggttatttccctcaaggtgaaagtcgtgatcatgagacaaaattccctgctaaagcaaaattctatgctgatctacagcagtatctgaccaccagcttaacgccttcctctcccgtactgattatgggggatttaaatattagcccaaccgataaagatatcggtatcggcgaaaataatatgaaacgttggctaaaaatgggtaaatgttcatttttaccggaagagcgagagtggttagcaacgcttatgggttggggattaaccgatacttaccgcgcccaacatcctgaagtcgaagaccaattttcttggtttgattatcgctcaaaaggctttgatgataaccgaggcttacgtatcgatttactgctagcaagtcgttgcttagcagataattgtatttcaaccggcattgactacgatattcgtgcgatggaaaaaccttccgatcacgcacctgtttgggccgagtttaagctttaattccctctccccccttattgataaaccccactttaaatagattaaaagtggggtttatttatatattagttagcgtcttacacaatcaactaagcatcactctttatattgcgattcgtagattgagactgcgctgaacgacttttcccttgtgcactttttttcgtcgcacctttacgttttttattctgcgcaggcgcaggcaggtttctaaacgcttgaatattaggacgacgtttagcttgagtaattaattcaaatagtgtgttacttaatggcatcataaaatcttgatacttaaattgcttctcactaatttgcgttaatattgattcccaatgagcggtcatatcgggtaatgtcgccatatctggcaaaacatgaattaatgctcttcctgctggtgtcgagttgatagctcgccctttcttttgcagaaagccgcgtttaaacagtaattcaataataccagccctagtcgcttcagtacctagcccatccgtcgctcttaggattttctttagctctttgtcttgcacaaaacgtgcaataccggtcatagccgaaagtagcgtagcatctgtaaaaggtcttggtggttgggtctgcttggcaacaatttcgcctttttcacaaagtaactcatcacctttagccacaataggtaaggcgctaccatcattttccgcatcttgctctttactacctaataaggtacgccagccggcttgtgctaaaaatcgtgccttagcaataaactttccattctcaatatcgagttcaatcacacatttgcggtacaccgcatctggcataaattgcattagatattgtcgggcaatcaaatagtaaatattcttttcattttcacttaatgaaatattacctgttttcgcagtaggaataatggcatggtgcgcatctactttcttgtcatcccagcaacggttctttttatcaatatctaatgtttcttgtggtaaaagactattatcatgcacactaatggcattcatcaccgcatgacgcccagcaaagtgttcatcagggagatagcgactatcggagcgtggataagtaataagtttatgcgtttcatataagcgttgacatgtgtctaacacttgttgagcgcttaaaccaaagcgtttcgccgcttcaatttgtaaagcagataatgaaaaaggcaaaggtgctatttcagactcttgtttatcttgataatcggtaacattagcaggcttgccagctattctatcaacaacatgctctgctaatttgcgatgtaataaacgcccttcttcatcttgccaaggctcgcagtgttcactcggctgccaaatagcggtaaatcgctcatctgcaggagtaacgatatgcgctttgacttcaaaaaaatctttcggtacaaagttttcaatttcttcatcacggcgtacgactaaacctagcaccggggtttgtactcgcccaacagagagtacgccttggtaaccattgcgctgtcctaataacgtgtaagcgcgtgtcatgttaatgccatatagccaatccgccctcgctcttgctaaggcagaaacacataatggaataaattcatgattgtagcggagcttatcaattgctcgagataccgcggcggggtttaaatcgttaatcaggcagcggcgtgcctgtttcctttgagcatcactaatattaaggtaattaagtacttcatctactaacagttgcccttcgcgatcggggtctcctgcgtggatcacttcatcggcttgttttagtaatgtgttgatcgtatctagctgttttttcacatcagcgcgcggtttgagttgccatttattcggaataatgggcaaatcatctaacgaccaacgcgcatagcgcggatcatatgcatccggctcagcctgctcaagtaaatgaccaacacaccacgtcacatactggttatcaccacaaacaataaaaccatcaccacgtttatgcggttttggtaatacatcagcaatagctcgagcaaggctgggtttttctgcaataaataatctcattacgttagtttgtcacttcaattaacgctcttcctgctttcggctctgttaattcaccgatcgaggtcaaatcaatattaaagcgtttagcaacttcttttacttgctcaacggcttctggctgtactgccagtaataagccacctgaagtttgcggatcacataataatttacgttgcatttcgctgatattaccaatcaaatggccataactttcaaaattacgtccagtaccgcccggtacacatccttgctctatatacgcttctacttcaggtaatcgtggtacttgtgaaaagtgaatagtggcttgtaatccagagccttcacaaatctcgctaaggtgacctaatagaccaaaacctgtcacatcggtcattgccgtgaccccttcaatatcagaaaaatcagtacccgctttattcatacggcacataatttcagtagctaggccctgatgctcaggttttaataagccttttttctctgcggtagttaataccccaatacctaaaggtttagttaaaaaaagttggcatcctgctttagctgcactgtttttcttaattttactcaccggtacaacgcccgttaccgctaaaccaaaaataggttcaggagcatcaatcgaatgcccaccagcaagggaaatccccgcttcttgacaggcggctcgcccaccttcgataacttcacgagcaatttcaggcgcaagtttatcaattggccaacctaaaattgctattgccataataggtttaccccccatagcgaaaatatcactaatcgcattagtcgccgcaatacgcccaaagtcataggggttatcaacaattggcataaaaaaatcagtggtactgataattccagtgccattacctaaatcataaacagcggcatcatctttcgtttcattaccaaccaataaatggggatcgtgaaacttagcctgttcactatgtaaaatcgtttccaaaacttttggtgaaattttgcagccacatccggcaccatgactgtattgtgttaaacgaattgcttcagacataacatgtcatccttttaaaaataagtcacaaaatcagttaaatcagcaggagaaaccgttgtaggtgctttcaatgcgggagtaccaagatataagaaaccaacaatatggtcgtgttcaccacaacctaatcccgctcttaccactggatcatgagtccaagagcctgaacgccaaataccactataaccttgtgccactgcagccatttgcatcgcctgaacacaacagcctgccgcaacaatttgctcccattcaggaactttaggatgcgctttaactttggcaatcacggtaataattaaaggtgcacgaaaaggtgcgttttttgctttttcttctacctcagcacctagttgactcaccaccgccgctttatgtaataattgactaaaacgctcaataccatcctctttcatcacgacaaagtgccaaggtttaagggcgccatgatcgggggctctcatacctgcttgtaaaatagcttcaagctgttggttatttggggctggagtagtcagtcgagacgctgaacgtcgatttaaaagcagtgttaatgcatccatttttgtattctcctgtcagtattattgtagcaaaatcccttaagagcagggatagacagttgttatcaattcgcagtataataaaatgttatattaccaccaccgagaaatttaagcggatatttttagctaaaataggattgtacttaagccaatattgagcgtttgttcaaaatatgaatgttttagcttttaggtgtaatacactgcccaagcgcaataaaatacgtgacagactttcgctagtcgctatattagaatggtgtttaaatatttgcagtctaagtagtcaatcgagttttgttattaaaggatcgaagtgagatgtagggaatattagcgttttttattctaaaaatagccgtgacctttgctgtctattgttcacctgcaaggcatactctcatgtaaataaggtatgttgtggctatacagctaatttcttgagtcgctcaatattgaaataaatactttaataatagaaacttaaacctttaccatcaattctagcataactgtttaggattaatttttagctttacatgatgtggagataatatgagtaaaattatggagttaatcggcactatttttcgatttagttggcaggcgattaactttatcaggaaactaatcttaaacgttattttcttctttctactttttatgggtgtaggactctatttcatcgtccaagaaacgcaaaaacctaccgattaccaaggtgcattactggttgatttaaaaggcgttattgttgaccaaacagctaaccaaaatcctttagggcaaatgagccgagagcttttgggtgtttcgggtagccagttacaagaaaattcgttattcgaagtcgttgataccttacgcaaagcagcgactgaccccaaaattaaaggaatggtactaaaacttgacgaatttgctggggcagaccaaccttcactcaattatgttggtaaagcgctgactgaatttaaaaaaacaggcaaacctatctatgcgattagtggttattatagccaaccgcaatattacttagcctcttatgcagataaaatttatttagcatcacaaggtgctgtgggtatttatggtttaggttttagtaatctctattacaaatcgctattagaaaaacttaaagttaatacccatatattccgtgtaggaacctataaatcagctgttgaaccgctgatgcgcgataatatgtctgatgaagctcgagccgcatcgaatcgattagtttccgtactctggtctaattatttaacgcaagttgcagaaaatcgtagtattaccaaggaagatgttttccctggtgcaaaagagatgattgtcgagttgcgtaaagccgatggcgataatgctacttatgcacttaatcgcaaactggtcgatactgttagctcttatgcccaatttgaagcggatatgaaagagacctttcaatgggatcatgaagctaagcagtttaataatatcagtatttatgattatgccgataacctcaccgcattcgccccagaaaacgaagacggcaatattgcggttgtggtcgttcaaggcgcaattattgatggtgaaagcattcctggctctgcaggtggttcaaccattgctaatcaaatccgtcaagcgcgtttaaatcctaatattagagcattagtattacgagttaatagccccggtggtagtgtatctgcatctgagcagatccgcagtgaaatagccgcctttaaacaagagaaaaaacatgtcgtggtttcaatgggcggaatggctgcatcagggggatattggatctctacacctgcgagtaaaattatcgctagcccttcaacattaacaggctctattggtatatttggtgtcatcaatacctttgaaaatagcttagaatcaataggtgtgcatagtgatggcgtgagtacatcgcctcttgcaggactttcggtaaccaataaattaccagaagatttttcagagctattccaacttaatattgaaagtggctataaaacattcctgaaattagtagctgaatcacgtaataaaacaccggcacaagttgatcgtattgcgcaaggtcgtgtttgggttggtgttgatgctaaacaagtaggattagttgatgaatttggtgatttcgatgatgctattaatgcagcagcaaccatggcaaaaatcaaacaaccagtcattgattggatgaaaccggaattaagcttatcagagcaaatattaatgagcttatcggccaatgcaaaagccattattcctgatccattacaagcctatttacctgcaccggtatttaaagaagttaaaacacaaactgagttttatcgtaatatgaacgatccgcaaaaccgctatgcgtattgtttatcttgtggtgatattcaataaataagtgtgctcccgctcaatatgagcgggattatcttagcctttgattattttttagttattttgctaaatggtgtaaataatgatttaaaacatcaattgctgtatttcaattgtgctttttgtctcccctttctttttttattctgcaaaccccctataatcaactctttcttatcgcttaattcataagagtgttaggtctgatgcaaaaaaaatccatttacgttgtgtatactggtggaactatcggtatgcaacattctgatcacggctatatacctgtatcaggacatttacaacgccaattagctaagatgcccgaattccatcgtgaagagatgcccaatttcacaatcaaagagcaccttcctttaattgattcatcaaatattacccctgaagattggcaatctatcgctgatgatattagcgagaattattgccactatgatggttttgtcatcttgcatggtaccgataccatggcatttaccgcttctgcactttcctttatgtttgaggggctggcaaaaccggttatcgtcaccggctctcaaattccattagaagctttacgctcagatggacaaactaacctattaaatgctctctatattgctgcacatcatccgattaatgaagttgcactgtttttcaacaatactctgtatcgtggtaatcgtgcgataaaagcacatgcagatggcttcaatgcttttgcttctcctaatagtgcacctttattagaagcaggcattaatattaaaacgtttaaaataaacccattacctaagccaaaaggtgagtttattgctcatcatattacccctcaaccaattggtgtggtaacaatatatccgggactttctgatgaggtggtgaaaaatatcttaatgcaacccgttaaggcacttattttgcgatcttatggtgtgggtaatgctccttctcatcctgccttgttatcaacgctacgcgaagcaactgagcgcggtattgtcgttgttaacctaacacaatgtatttctggtcgtgtcaatatgggaggctatgcaacaggacaagcacttgccgatgttggggtgatcagtggttatgatatgacttttgaagcagcgttaactaaactccactatctacttagtcagcaatatagctatactgagatctgccgtttaatgcaacaaaacctccgtggtgaaatgacattaaacgatgacgactaggtctaatcaaaggtaactcctgtgaaaaattcagcgttattattagttgatctacaaaatgatttctgtaccggtggcgcattggctgttaaggaaagtgataccgtcatagatacggcaaatcgacttattgattattttcaacgccatcagcgtcctattattgcgagtaaagattggcatcccgcagatcatctcagctttgcaaaaaattcaggtactgttgttggcgaaattggccaattaaatggccgcccacaagtttggtggccagtgcattgtgtacaaaatagccatggcgctgattttcatccattattaacagatgatttaattagtcatattatttataaaggccaaaatcgacttatcgatagttatagtgctttttttgataatgaccatgaatatcaaacaggattgcatactcttttacaaagcatgcagatcgagcatctcaccattctagggatagcaactgattattgcgttaaatttaccgtgttagatgcattacaattgggttatcaagtatcagtggttatggatggttgtcgaggtgtcaatattcaaccagatgatagccaactcgcatttaatcaaatgcaacaacatggggcagttttagttgattcagtaacaatgcttaaaagtgacaaataatataaacaacatgattagcaattatcattctctacttgtatgaatagtagaactaaaaagtggtgatttatccaaataataaactaataaatcaccaccgttacgctaactttcattatttaaatttaaaaacgtcttaatcatcatccattggtgttaatgtggctaaacgttcagcttgaaattgcgcttttagctcttgtttgcttttcatcgtaatttgtccgtttgtgccaaccgtcatatgttccggattatggttattctgcgcttgccataagagaacaatttgcatgcaatgctctttttgctctgccgtgagtgcaacgccgtctggccatttacctagctcaactgcggtagaaagacgttgataaatctcaggtgtgaccattgaaattaaatcattaacttccattgattgctccatatatcaaattaccacgcaaaagctgaatcgtttttttatttgttaatttattgttaatagcgactatttagcccttttgcacttcacctgtttctgtattgctaaatgccaaagaggcagaattaacacaataacgttgtcctgtcggtgctgggccatcattaaatacatgccctaaatgagcaccacattgatgacagcggatctctgttcttttcatattatgcgaaaaatcatcaagataaagaattgcatcatcacttacaggttgataaaaacttggccagccacatcctgcatcaaatttagtttccgaataaaacaaaggcgcagaacaacataagcaatgataaatacctgtttctctattatgtaataatttaccactaaacggcggttcagtaccccgctgttgcgtcacataatgctgcatttcattgaggtttgataaatcaatgtgattgttatcacttgaaatatgcacttttttttcattattgctcataaacacctcacactgacaaaaatgttttttaaaacaacagcaaataataacaaagatttaacaacaaatctggaaaatatagtctaaaatcaatgagagtaatctttagtttttgaaatgtgatacatttcacataacggagcaaaggtaacttcatttatcggcaatgatcccgataatacacagcgtaatatttatctaaaacgaccaatccttaagcaaaaagtgtttttttaattgattttttgcaattattgacacgattccgcttgacgactggcgcggttttggtaactttagaagcaactttttaattcactaataaagctggtggaatacatatgactatcaaagtaggtattaatggttttggtcgtatcggccgcatcgttttccgtgctgcacaagaacgttcagatatcgaaatcgtaggtattaacgatctgttagacgcagaatacatggcatacatgctgaaatacgattcaactcatggtcgtttcaacggtactgttgaagtaaaagatggccacctcgttgttaatggtaaaaccatccgcgtaacatcagaaagagatccagcaaacctgaaatggaacgaaattggtgttgatgttgttgctgaagcaactggtctgttcttaactgacgaaactgcacgtaaacacatccaagctggtgcgaaaaaagttgttctgactggtccttcaaaagacagcacacctatgttcgttatgggtgtaaaccacaaatcatatgcaggtcaagatatcgtttctaacgcatcttgtacaactaactgcttagcgcctttagcaaaagttatcaacgacaaattcggtatcgttgaaggtctgatgacaactgttcacgcaacaactgcaactcaacgtactgttgatggtccttcaatgaaagactggcgtggtggtcgtggtgcttctcaaaacatcatcccttcatcaactggtgctgctaaagcagtaggtaaagttattcctgaactgaatggcaaactgactggtatgtctttccgtgttcctactcctaacgtttctgttgttgacttaactgcacgtctggaaaaaccagcaacttatgctcaaatctgtgaagcaatcaaagaagctgccgaaggcgaactgaaaggcgttctgggttacactgaagatgcagttgtttcaactgacttcaacggtgaagtattaacttcagtattcgatgctaaagcaggtatcgcgctgaatgacaactttgttaaattagtttcttggtacgataacgaagttggttattcaaacaaagttctagatctgatttctcatatctctaaataattagagtttagaaagccaagattgattttagagccaccctttcggtggctcttttatttttttactcggcagtttattgtattcaaatagtccgcgacataaggttataaaataatgaatgagaaaattttttctttgccggttattgaacaaatatcaccttacttaagtcgacgccaattaggtgaactccctattctggtgatctctcaccccaaagtacgtgcggctattagtcttcaaggtgcccatcttatcgcatggcaacccgcacaaacgcatcccgttttgtggctcagtgaagatgccttatttactcccggtgttgctattcgtggtggtatccctatttgttggccttggtttgcctcagcgggaacaccaagccatggatttgcacgtatcttaccttgggaatttagtgctcattctgaacaagaagacggagtgcttatcaccatgacactcaaagaaagtgcacaaactcaaaagtattggcctcatgaatttactgttattgctcgatttaaattaggtgatacctgtgaaattgaattagagtcatacggtgactatgaagccactgcggcgctacactcctattttaatgtcagtgatatcgataaagtttccattacaggccttggtagtcactatattgacacagtggcggataaagaagtttataccaacgaaacagccctacgctttaacggccgtactgacagactttatactgaacctgaagattttaatcttattcatgatgatggttgggatcgtactattgaggttcaccattatcatcacagtgatgtcgtttgttggaatccaggtgcagaactcgccagttcaatgaaagatatgagctcaggtggttaccgtaaaatggcatgtgttgaaacagctcgtattcatcgtccacttaagccggataatgttcatcctggacgtttatctgctgtgatacgcgtacgcaaaaatattgctgaaaaatagtttgccactctactttgtcgaacgaaaaaagcttcgaacaaattcgaagcttttagttatcgaaagcaacttaacttaccgttttaccgttagaaagtataagtgacacctgtccataaaatagccgttaccgatttatttaccatcgggctatctttaacttcgctgggtaagcgatccactcgtcccatcgcgaagaaatcccagttttcagcaaacttatagttagctgagatttcaacataaggtctccagctatcatttggtcgatattctgctaaaccactacgctgagattctccctgactaatcccatatgcgtaacgattctgctttttattttcccaaacagcaccaattcccggttgaagtgaccaattgcctagttcaaaaggataaaggtaagcagcatcagcaataatgccattacttttacctaaaagatcacctgaaataatccctcgtaaacttccccatgactcatgatgtttataggtgaatccacccatgacggtatcacggcgacgattaagttttttcatctgctcatcatcagagtcacttggtttaaatgcttgtgggtaatagtgaacatcgacagacagctgatctttcggtgaattccataaataatatcctgcggctaatgtcgcaaaatagaaattttcagattgataattaaccaaaggtacaggtaataaatagtctttagatttagcacccttataaggtgttacttgtgataatacagaaccccctattgaccattctcccgcaaaggctgtcggtgtactcaatccagcgattatggctaaagaaataacaattttctttttactcacgatgattttccatattgtctttgataaaacagtgaccaaaaaacgactgttgttatggtgcactaaaagttagctaatagattacaatcattttattttttacataaaatgactggcaataagtgcttgtcctaatgcaattccaccatcaccagatggcaatatcataggggttaatacctttttattgtttaatttttgcttaaacagatccttaagtaagatattattgaatacccctcctgttaaaacaatagtatcaatctgatgttcttgcgcagcttgcagagcaatatcacccaaactttcggctaataaatagtgaaataaccaagccttctcactggtattcaatgtgatgctttcccattgtgaccagaaaatggacaaatcaacatgcttatcttttacaggcattaaatgtccatattgcttgatgatatcagcataccgatctacgtgacactgtaacgcagcactttgtaagtagcatgccgcttcgccttcccagcttatttgtttaggtgataatcccaaagagcaagcaactgcgtcaaataatcgtccacaagatgatgctagcggtgaatttaaaccacgagccactgccttactcaaaatctgtaactcagtgagcggaattgcttgggtgataacactaccttgccaatcttttgtaaaagtagctaaatgtgcgaaccaatttcgccaaggctgtattgaagctaaatttcctcccggcatagcaaccgcaggtagcccgccaatacgttgagattttttataatccaccagcaaacactcgcctccccataaagagccatcttgtccataccctagaccatcaagggctataccaattactgcgccttgttgctgtgtatgtccatgctctgctaagcaagagacaatatgtgcatggtgatggggaacttctataacaggaatatgttgctgttcagctagctgtttacctatttgatggctgatataattaggatgagcatcaatggcaatcgctttgggcgtaaaacgatagatctgttgaaacagcgtgagtgatttcagtaattgttgcctcacacttaaatcatctaaatcacctaaatgcggccccataatagcttggtgctcttttaagagacaaaacacatttttcagatcccctcctaaagccaaaattgcaggttgtgcatcaaaagtggttggcaatgcgatagcatctggtacataaccccgtgaacggcggatcatcacacactgaccatcttcaatacgcactaatgaatcgtccgctctttgtataatctccctattatgcattagaaataattctgcaatatcaccaagctgaattaacgcctcttcattggttaatgcaggagtgtgtcccgtcgcattaccagaggtcatgactaatggaatttgtgtttcatgtgcgagaagatgttgcaaaggattagctggtaacataacacctacttctgttaatccaggtgcaatcagttcacttaatgaaataggggcgatttctttaggaataagtacgataggtgctgcggtactggttaatgtttctatcacttttgagtaaaactcggcattatcgctcggtttttggatctgctcagtcccggttaacatcaccgcaagtggtttggctggacgatgtttacgcgctcttaaacgcgcaacactttcactattgcgtgcgtcacagactaaatgaaagccaccaatgccttttacagcaacaattttccccgctaatagcgcctgacaagcttgcgttaatgcccgctcttttattgcaagttgttgcccttgatgatctgccaaccaaatatgaggcccacagacaggacaggcattaggttgtgcatgaaaacgcctatctgcgggatcttgatattcatgttggcaagtcggacaaaatggaaatgcagacatagaggtaaaaggcctgtcgtaaggcattttttttataatagtaaaacggggaccgcaatgggtgcagtttataaaaggatagtgataacgacgattttgtggatcaaacaactcatcaatacaagcctgacaagtcgctgcatcaggtacaacttgtgtatccatttctccaccaccactttttacaatagtaaagtccgtggggagttgctcccattgataaggtgtttgttcaatacgttcaatgcgtgcaagaggaggacattgagctgttaatgcattaataaagtgttgattttgcggtgataacgttaagtggatcaatactcctaagctatcattactcacctgccctaataaaccaaaatgatgtgctaattgccaaacaaaggggcgaaagccaacaccttgaacctttcctttcacacgcaatgtaatgccgttactcataggatcaccaaatcaaaataagtttaagcttattctagtttagtgattattaacaactttcatttagatcagaaaaagtagagtttgctacatttatcgtcacttcaaccgccactcgcggtgcaatagcgcacagtaattcataaccaatagtgccacaagccagtgcaacttcatcaaccggtaattgatttccccatagctcaacagggcttccatgttcaacatccggcaagtcggttacatcaatagtaagcatatccattgaaatacgcccaactaattgtgttttatgtcctttaacgataacgggagtaccatctggggcatgccttggataaccatcagcataaccacaagcgacaacagcaattctcatatcacgttgtgcggtatatcggctaccataaccaatttgctcacctttttttactgactgaatggctaatacttcactgttaaaggtcatcacaggttgcaaatcaaaatcagcaatatcttgccacaccccagagggggatacaccatataaaataataccgggacgaacccatgaatgatgggtttgtggttcaaataaaatagccgcagaattggctaaacagcgcggtaaatcatttaccattgagctatcaataatctgtttttgtgtcgccatattcagccctgtatcagcattggcaaaatgggacatttgtacaatagagccaatgttagttatgccttttgctctttgtatggcttgctgatagtcttctggtcggtaacctaaccgattcatgccactattgagtttcagataaatattgataggccgctctaattgcgcttgctcaatggcttcaaattgccaatcagcatgcacaaccgtcgttaatgaataacgctctaataaatacacatcatctggtttgaaaaaaccttcaagcaaaagaatggggcctacccatccttgctctcttagcataattgctttatctaattcaattaaggcaaaaccatcggtatgacttaatgcaggccaaacacaagaaagaccatgtccataagcatcagctttaaccactgaccatactttacttccctgcgctttcgatttgatcaccgaaagattatgactcagcgcatctaaatttatgctaattttggcaggtctggacatcgtctctccttaattaataaacagcgtcaagtttttgccctggacggagcaatttagtattaaatccatcgatataacggaacacggagagatcatctgcagcaattgccgttttattacctgatattaaatcagctaacagttgtcctgagccacatgccatcgtccatcctaatgtaccatgccccgtatttagggataaattacgatatgcggttggcccaactatcggtgtaccatctggcgtcattggccttaagcctgtccagaatgtcgctttactgatatcaccaccaccctcatagagatcttgaacaaccattttgagcgtttcacaacgtgattttaaaatattcaaattaaaacctaccacttccgccataccgcccacacgaatgcgattatcaaagcgagtcaccgcaatcttatatgtttcatctaaaatagtggatgttggtgctctgcttgcatcaataataggcatggttaatgaatagccttttaaaggataaaccggaattgtgattttatttttcaaaaattcagtcgagtacgatcccatggcgacaacatagtgatctgcggttaataaaccatcatggcattgcacaccggtgactttatcaccatcaaaaagtaggtgttttatttctttattaaataagaaggtaaccccggcctcttcagccattttagccagtttcttagtaaagatttggcaatcacccgtttcatcattaggaagacgtaatcctccggtaagtttatgactcacatgctctaaagcgggttctgctgattttagttgctcggctgttagcagttcataagccacaccttcttgctttaatacagcaatatcattagcggcattatcaaattgtttttgatcacgaaatagctgtaacgttcccccttggcgtccttcgtattcaataccggtatcttggcgtaattgacggatacaatcacgactatactcagcaatacgcaccatacgactcttattcatcgcataatgagaagcatcacaattacgtagcatttgccacatccagcgtaattggaacagtgagccatcaggtcggatcgctaaaggtgcatgtttttgaaacatccattttactgcttttaatggaatacccggggcaccccaaggtgttgcataacccggagatatttgccctgcattacctgcactcgtctcttctgccgcactactttgcctatcgacaacaatgacttcatgcccttgttgtactaagtaccacgcacttgttacaccaataacgccgccacctaagatgatcactttcatggctagactccaaataatttacattgatataacataagaataatattccatacacaaaaagccagcacagaataatcatctagcaccacaaaaaagcaaattttagagtcaaatcacatttaattagtaataacagtgttagttttgcagagtaattattaattctatttaaaaatcaagttgatagagtatttagcgctttttataaaaataatacataaatatattattcaaatataaattaaataagccaataaaaacccatcatgcaatttttatgaaaaaccaaaaaaattatcattatcagaatataatattaagatgagatatgtttcaaattttttttactaaaaatagccaaattaaagtatcacctaaaaatggctggttaaactaggcttgctgtttttagcccgctattctttcacttctccaataatagtcatcatatttctattactaccattttctggataataaaaaatcagcactggatcaataagatccaatgctgatgttaagacgggataaacgcgatgaattaacgttttacttcttctaagtcactaggtagtggcgattgaagctcatgccaaataatgccactctcttttccgtattggcgaacgcaatccataacatgctcagtatctttttgttcacatagcaacgccaattttttataaaatgatagcgccaactctttcgcctgaacattagagaaataataacgccctacacgggtatataatcccttaagtccgtttaagatcaatccataaataggattaccgctggcaaatgccaaaccacggaaaatgttatagtccaactcactaaactcatcagcactattttcagtcgttagttgatgagtcagtacttctagggatttttctggattatttttaaatgccgtgcgaataaaaattgctgagatattcgttcttacggctaataaattatcgattaattgtggcacgcgatcatgatcaagacgcgcgacagtttcaagaatattaagacctgacgtttcccaaaagttattcactttagttggttttccatgctggatagttaaccaaccatcacgagctaaacgttgcaaaacctctctcaatgtcgttcttgtcacaccaattaattcggaaagctcacgttctgcgggcagaatagaacctggtggaaaacggttgttccaaatactttcaacaatgtactcttccgcaaaacctgcggggctttgagccttaataaccatatttttatttcttccgaagcgttttttctgctaataatagaaaagataatatcagaatgcttaattttgatatagctcaaccatcgctaaatagtgaatggcatcataaaacatgacactgttttatcaatttattatttacgaatacgcttaatttcacagcgattagagcgtattatgactagattgcgcattttaggcgcctaaaatctctattcggaggataaaaaacataatggatatgagtataagacaagcattactgaaaaatttcatggggaactcccctgattggtataagcttgctattattacttttttaatcatcaacccactgatttttttctttgttgaccctttcattgctggctggctactcgttgttgagtttatcttcactttagccatggcattaaaatgttatccgctacaaccagggggattacttgctattgaggccgtcattattggtatgacaacgccgaaacaaataggtcatgaaatagccaacaaccttgaagtcattttattactggtctttatggttgcgggtatttattttatgaagcaattacttctatttgcttttacaaaattactcctctctattcgatctaaacgcttattatcattagcattctgttttgctagtgcctttttatctgcttttttagacgctttaaccgtgattgccgtggtgatcagtgtttctttaggcttctattccatctaccataactttgcctctaaccaggctgatgcagagttaagcaatgatggctttattgatagcacagagaaaaaacagaccttagaacaattccgtgctttcttacgtagcttaatgatgcatgccggtgttggtacagcattaggtggtgtgatgacgatggttggtgagccacaaaacttgatcattgcaaaacacttagaatgggattttgtcaccttctttatcaggatgtcacccgttactattcccgttttctttgctggacttgcagtatgttatttggttgagcgctttaagctgtttggttatggtgccgagctacctgaattagtgcgtaaagttctcactgactacgataaaaagaacagtgaaaaacgaactcaacaagaaaaagcccagttattaatccaagcattaattggtatttggttaattgttgcactggccttacaccttgctgaggttggtattattggtctttctgttattatcttagccaccactttctgtggtatcactgaagagcacgctttaggtaaagcttttgaagaagcactgcctttcaccgcattacttacggtattcttctccgttgttgccgtgattattgatcaacagctatttggtcctattattcaatttgttctacaggcatcagaatcttcacaactgtcactcttttatctctttaatggcctactttctgccatttcagataatgtatttgtgggtacggtctatatcagtgaagcattaagcgcattgcaagaaggattaattagccaatctcaatatgaacatattggtgtcgcaattaatactgggactaacttaccgtcagtggcaacgccaaacggacaagcggctttcttattcttattaacttcagcattatccccgctgatccgcttatcttatggacgtatggtgatgatggctcttccttataccattgttatgacactgttaggattactagctgtagaattctggctcgtgccaatgacacattggttatatgaaattggcttaatcgctattccataaaaaaccatcatgaaatgagtattttttagggcttttaatgtttaaaagccctattttttcataaaaacacctattaatgtaaatatttgtgaaataagagattttaccttttttttagtctagtttttaggcagaataacaacttatttcaatattatcatggacattgttatgttgagtgctcttcgtcactggtcacaaagtcgtttttcatggttactgctggcattaacggcaattggtcttgaaggtgcggcattgtattttcagtacggaatggaattaatgccttgtgtgatgtgtgtttatcagcgcattgctgtattagggatcttagttgccgcattaattggtttttcttcgccaaaactgacactaatgcgcatggcgggtagttttttatggctttatgcctcataccgcggtattgagctagcttgggaacatacgcaacttattcttaatccatcaccttttgcaacttgtgatttctttgttaccttgccttcttggtttgcattgcaagattggttccctgccgtattccaagcatcgggggattgttctgttagccaatggcggttcttgtcattagaaatgccacaatggatgttaattatcttttctgcttattttattgttggtttattagtattaatcagccaagtcacctcttctttttccaaaaaagactaacatacgctactgttagctatagaaagatagagcgcagataaattattatcatcacaaaaataggcgcttaatcagacattaagcgcctatttttctaattatcatttatttatgcatatccccaagcgtattaacctggaatacaggcaccatcaatcaacgcttgttcactacaacgtttaccattagcaaattgacaaacgggtgtttgaccgccgtgtaattcataagttaacgcaggcactccaccagaaaatatacaggtctcttttgctggttcctctaaaggaatagaaggtgtggtcgctatcgttttattgctattaatcacttgagcggtggtattttgcgcttgtttagattgactacagccagtaagcaacgcaaagctggtcaacatcaacaaaaaacacgttgctttcatttttctttgcattataaaaacacctaaattatctctgttatctctgattagtgtgaggtgctattggaaagtaagttaatcactaagacgccggcaataattaatgtcataccgacgatggcgggtaaatcgagtttttgttgatagacaaaaacagccgcaacagaaactaaaacaatacctaatccgctccaaattgcatatgcaatacccagtggcatgactttcacaacttgagatagcgcccaaaaagaaaaacaataccccaccacgacgacaatagatggatataatcgactaaagccatcggatgcttttaacaccgttgttgcaataacttcagatataatggctaatattaggtaagttaatccattcatttcttcgccctactaagatccaaattcaattttgtgaattctatcacaagatatttctgtgatatctattttagaacaacaaaaaaggcatctattcagcgcaatagatgccttaaaatgctatttatagattttgtttaatggagccggtttttttcgcgaggtttgcctcccatcgcaacacgataacgggtaaaaataaagccacaccacgctagtgcaataatacttaaggctgttcctgcatagccgatatttggcattcccgcgtgcaatattacttgattacctaacaaagcccctgccccaataccgatattaaagatacctgagtagatcgacatggcgatatctgttgcatcaggtgctaagtcaatcactttaacctgcaatcctaacgcaatacacataaagcctatcccccaaaagatgattaaggcaataaatgtgagtgtatgttggctacttatcatcagcgtacttaagcatacggttaagagaataagtgcaaagaataagaatgaggttggcattttggtactatagcgactaaataacacactccccaaaattcctgcaccgccaaaaatcagtaatacaatagtggcaaaattttcatctaattttgcaatatcaataacaaaaggctcaatataactataagcagtaaaatgagcggttactgcgatcaccgttagtaagaaaatacccactaatggtgctcgttttagcaatattgggacactttttaacgagccggaatgttcactgggtaataaaggtaaatagcgcattaaagcaagcatggttatcagcgccagtacacctatacccaaaaaggtagctcgccatcctaaccattgtccaaccacccttcccagaggtaaacccagcacggtagctagtgcaacaccggttgctaataaacttaatgcttgtgcttttttaccatggggtgccattcttattgctaatgaggcagtaatcgaccaaaaaacagcatgagcaaaggcgactccaacccgacctacaattagcgaattaaaatcccatgccacgccagataagacatggcttagaataaatacaataaacaaaataatcagtagcttacgtcgctctactttgctggtcattatcattaatggcaaagacattagggcaacaacccaagcataaatagtgatcatcaaccctgtttgagccggcaccatggcaaaactttcagaaatattacttaacaatgcaacaggtacaaactctgtcgtattaaatacgaaagcagcaaatgatagaataattaccctgatccacgccgtcttacggcttacttcattaatgctattgggtgtggtgatattcataattgtttaaatacttttcagtgaattttataaatagataaaagatacttatgtactactgccagtgaatttcataaaaagaagcgcaaatacccatcgttatattttataacatctaaatagaatagataataaagcgtgttttataaagcgataagtaaagataaaaacaaactaatgaatagaaaaacatctgactaaaacgaatcagcctattatgttagcataggcatagcgctaaattaaatccctacattggcttctttttaacgttaacattttatttggatcgcaaaagggagatcggcaaggaaaaatagcgttactgaatcacatttttattaataaaaaatgataaccatttcatgctattataaatagatcttcacgggcttattgttgcagttagtctaataatagagagtctatattataaaaacaaagagaataactatacagtagcttaatacttatggattaattctgtctataaattgaatagcttgctcacaggcaaagctttgggctggagatgagctatcattaaggctatttttaatagcaaaaatttgctcaattgatgaccgaggaagtaacaaactaccttccgctagtgctttttcaacactgtctaatttagacacgagttgattacaactttcactgttttctaatgattgataacgtgccatgacatcatcacgcttacctttgacaaaagaaaacatatcgttgatttgtgttgaggagttttcaataacattacggctattattccaagcagcaacggtatcttctttaaatacagaaacaactaagattgcaacaaaaatagcaatcataatagtcaatgatataattcctcctgcaataataattatttgtttcatgaaagcccccacatcactaatcatctttgtatctgtatataattaaagccattcatattcaatattgattacaattctttttattttttacattttattacgcagacaggtagccctattggcataagaaataatttattgttataatttaaatattgttaagttattatacttaaattctgattttaattattatttggatatgcgttaaaaataagatttatcgcaagtatatctggttttcattatagccattataacgattatttattcaagcatattgataatactttataagataaaacgtcattaaaagtaaagtattctaaacttttagttgtaaccttgaccttcccctaagggggatctttagaataaagataattcatacaatataaagggaacaatgatgaaaaaagttttacctatcgccatcgttttaatgggttcactctcttttggtgcaatagccaataattcacatatgaatatgaatatgggtactaatgtggcacagagtaactctcctatgaaccaagagctcatggattcaatgaataaaatgcatgaaaatatggcaaaaggaatgaatagtgctaatgcagatgttgcatttgcgcagggaatgattgctcaccatttgggagcaattgatatggcaaaaatcgagctaaagtatggtactgatcctgaaatgcgcaaattagcacaagctattattgatgcacaaggccctgaaattgaacaaatgcaaaaatggttagaaaaaaataataccaatatgcaaaataactaatatttgaaacgcagacgttctattaaggaaagtctgcgttttcttacattgccatgtcattaacctgtaactattagcgaaataacagcattatatcttctctatttaatgttattgcactattaaacatcagtatacctaaaaatataaacaatattcctgctaatagacgtagtagctccgccatatacctaaaagataaattagtattttttaccgaaaaccgataagcaacatttcgcatataataaactgttaatgcaattgcagtaatggttaaagccgttcctattgccattgcaatgacagctgctattccccaaagatagatatttaatgcatatgaaaataacaatactaacaatgcgccagagcaagggcggctaccaatagcgaatagtaccaacaattgtgccgaccaattcccttgtaattcattggaagtcaccacatgtttatgaccacaacatgatgtttgtgagatggtttgattgcttttatgtttatagagatatctagatcgcttgatgataggtgttgcctgtttaatataaaaagcacgctttttatagtctgacaataaacgacgaatagactggataaaaataataatgccagataatgaaattaataaatagctactattttcaatgtaatgactcgctatttttaaatgagagcttgataggtttaatattattaatataacagtgatgataactatggcaactgtaccttgtagcaatgaagcaaggacacttaaccacgcactttgttttaatttagtcgggtgagtagcaatataagtactaataatgacttttccatgcccagggccaacagcatgcagtaacccatacaaaaaactaacacctattaatataaagcctacttgccaattattttcgctaatatcttgcattaattctgcaagatagctattgataactttttgccattgaacattaaaataagttagttcagaccaataataagcaatcaataacaaacaactggctatcactgtgagtaagctaattagtaatcccctttccttcgttatatttattggcataatacttgtactcgttgtgtaaaagagagccctaaatttaaatcactatcagtagagccattgatatctaatgattgtgcatattcttttaaactttcatcagcaaaaggttcaatcagtttgtgtttacaatcagcgatcatttctaaaggcaatatgatctgtgtattgtcacgataggtcatgctgacataaaaagtgggatcataagttaaaagttcaaaatgatgtttagcgaatggcaatggggtgataaatagcacatcaaagctaaacttcacctgtaacttctcttttataagagtgtaatggcttggtatacgacgaaacttttgttttttcccatccatataaaactcggaaaaatagttctgagataatatattgctcattaatctcgccgcctgttttttccaaatatcactttctggttgcgcattatatatatcgtacagaatatccattgaggttatcggatccataacccaagaaaaagttaatccaattaacttatcatcttgtgtattaaaagttgtttgcatatcaataaagctatgaggatgtgctaaaacttttggtgtagtcatcaataaaaagaaagacatcaatatcggaactgctcgccaagagaaatttttaaaattagctatccacataaacaaaaccacccatgatattttgttataatataacatcacggatttgtaaaatgatagtcattttatgaaattattctaggtgtgttataacttggtttagtgaaagcgaggtgtttagaaagcaaaaagccaccctattgggtggcttagtatttttaacttactaaagtagtagtaaagttttatatggtgcccagggcgggacttgaacccgcacagcctagaggccgagggattttaaatcccttgtgtctaccgatttcaccacctgggctaaattgtatttatttatttttcttggtacttatttattagttaagtacataataaataaacttaaatcattttttgttttaactttatgtaactaataacaatatttattacgctaaaactacttttcctataccaaccaccagcgttgtagttagaagaaaaaacggacctaaattaaggtccgtattttatatggtgcccagggcgggacttgaacccgcacagcctaaaggccgagggattttaaatcccttgtgtctaccgatttcaccacctgggctaaattctgtggtgcgtccgtaaaattataactaatttttactggtaaggacgactaactacttcccaatgccattatttatggtctttttacaccactctctcaattaggagtggtgcccagggcgggacttgaacccgcacagcctaaaggccgagggattttaaatcccttgtgtctaccgatttcaccacctgggcatttatggaggcgcgtcccggaatcgaaccgaggtacacggatttgcaatccgctgcatgaccactctgccaacgcgcctcaactgctcaatctcttaagagattggagcgggaaacgagactcgaactcgcgaccccaaccttggcaaggttgtgctctaccaactgagctattcccgctttaccgaacttgctgatttacttatttatttctgtaaaccgttgtgcctttcgatgcgttgcattctactgatttcctgaatctagtcaacactatatttgcatctttttgactgttcggtgaattttcagtcatttcgatcaagcttcacgcaaatctgaccatgcagcactcaaatattggaacatagaccagaatgttaataccgtcgcaatgtataacaatacaaatccgaaccactcagcttcaatagtcggacgccataatagcacaacaagtgcacccatttgtgcggtagtcttcacttttccgatccaagaaactgccacactattacgtttacctaattcagccatccactctcttagtgatgagatgataatttcacgtgcgatcatggtcgctgccggtaaagtgatccaccatacatgatagtgttcagtaattaatactaatgctgtagcaaccattaccttatccgcaactggatcaaggaaagccccaaagcgagtggtttgcttccaacggcgggctaaaaaaccgtcaaaccagtcagtggcggcagctaccataaaaataatggcacaaataaggggagcatctttaaatggtaaataaaacaccaaaacaaagaatggaattaaagcgacacgaaataaagttagccaagttggaatatttagttgcatagcgttctacacgacctagaaaagtgagagttattaatatggtgcatcaatacacttagtgtttcaacgcattaaaaattttttctgctaacgcggtcgaaattgtgggaactttcgcaatttcttcaacgcttgcatcacgtaaagcttgtaaaccacccatatacttcaatagcatttgacgtcgttttggtcccaccccctcaatcgattctagagagctggtgtttttaaccttagcacgacgctgacgatgccccgttattgcgtgacgatgcgactcatcacgaatatgttggatcaaatgtaacgcgggtgaatcagaaggaagtgccacaccttcgccttctggtttaaaaaatagtgtctctaaccccgctttacgatcactccccttcgcgacaccaattaatttagggtgtgatttatcccaatcgacatcaagtgattgaaatacgtcaatggcttgtgctaattgccctttaccaccatcgataaaaataatatcaggtattttactctcttctaatgacttgccataacgacgagtcaaaacttgattcatcgcggcataatcatcccccggagtgatcccactaatattatagcgcctgtattccgattttaatgggccattcatgtcaaatacgacacatgaagccacagtttgctctcccatagtgtgactaatatcaaaacattccattcgttttatctctttcatctctaaaagtgacattaacgagttataacgttgagaaatggttgattgttcaacttgcttagtggctaatgccgtagctgcattagttcgtgctagttttaaatagcgtgctctatcaccacggggtttagtttggatatggatcttacgtcctgctatcgaagaaattgactccgctaaaatcgttttatcttcaagattaaaatcgagcaaaatttctgtgggtaaagtgcggatcgcactgccttgtaaataaaattgtccaataaaggtttgtaccacttcgtctaatgatgtatttgccggtactttaggaaaataactacgactaccaagcactttaccttgacggaaaaagagcacatacacacaagcaatagcaccattaaatgccacgctaatcacatcgagatcatcgccaatattagccacaaactgtttttcagtaacttgtcttaccgcgtgaatttggtcacgaatacgcgcagcctcttcaaagcgtaacgcttggcttgcctcttccattcgtttaattaagccttcaatcacttggctgtcatcgccggataaaaaaagacgcacataattgacttgctgtgcatactcttcatcagagacataaccttttacacaaggggcgagacaacggcctatttgatattgcaaacaagggcgtgagcgattgcggtaaacactatcttcacattgacgaataggaaataatttttgcatcaaagctaatgtttctctcaccgccaaagagttagggaaagggccaaagtattcccctttagcatgtttagcaccacgataactcgccaatcttgggtgtttgtctgcacttaaataaatatacggataggacttatcatctcgtagtaacacattatagcgaggctgataacgctgaatatagctatgctctaaaagtagcgcttctgtctccgtatgtgtcacggtaacatcaatattggcaatacattttactaatgcttctgttttacgactattcacctgagcacgaaagtagcttgataatcgttttttcagatcttttgcttttccaacataaataacggtgcctgaggcgtcatacattcgatacacacccggttgactcgttactcgacttagaaatgctttagcatcaaatatgttttccactttgtaagtaactctctatctcgattaacccataacgaactgctatatgagttaattctacatcacctgagattttaagtttactaaacattcgataacgatagctatttactgttttagtgctgatattcagctcttgtgcaatttgtgctatttttttccctcttataatcatcgacattatctgtaactctctttcagaaagatgatgtagcggatttaagtctgcttgtactttagttagtgcaatatccatagcaatttctggactaatataacgttgaccaatacagacttgtcgaatggcctgaagcacattcgcagcagaggaatctataacgataaacccttcaatacctaactgtagcaatgtgacggaaagtattgagtctattttaggcgaaataaccactatttttataatgggagaaaaacgtttaattctttttattacatctattaaagagacagtaggtaaagaataaaaaataataagattgacagaatattgtctgcaataacgaaaagcttcactttcatcattcataatcttacgaatgttaatttttttaatctggcaaagtaatttttctatacctaaactaaatatttcaacttgactgattactagagtatttatcaacgatatcaatccttaaaaatatttaataaaattaaaaataaatcaaggcaataaaatttataatgacaaatgctattataatatcgttagaatttccatatttttattttttattcacgcaacaatgatattataaataaattattattcttaccgcattaattaataatgtattaaaatcatacacacatttataaagaatataaaataaagctaataacatataataataattaattataggaataaagtacttcctatataaaatataagaagcactttagtactttaaaaatgatcaaatgtcaccgctttatcaaaagataatttacctaatcgtggaaaaggttttcctttacctttaccaatggcaatcattaaacagatagcatagtgatcaggcaagttaattgtttttgctacctcggcaaaatcaaacccatccataggacaagaatcaaaaccgcgctcttgtgctaataacatcagtgtttgagcaaacaaacccgcactacgcataatctcatcccgttgtacttgtggtttattacgataataactatcaacagcactgcacataatatctctgacttcagggttagcatcttgccaaattgttttaacttcactctcccaaacattgagatctgcacataaaacaatcagcatagcagagtctgttatttgaggctgatcccaacccacttttcttaatgcttgacgttgcttaacatcatcaacaaccaaaagacgccaatgctgcagattaaatgcacttggcgtatattgtaacgcatcttcaagtaaggcttttttctcttcttgtggtattttgaaatcagcatcaaactgttttgttgcacgacggttttttactgcatcaattacattcattattttccatccatttgctaatcattgacatttatttatctattatagaagaaatgcgttcagtatgcagactgtgctattatttctaattatctttgttaattaatcagttataacgaaaaaactacttattaataacaaaatatcgttataatagtattatcaaatatacgataaacctttatttttcctatttgtttttaagcgtaaaagaaggcgaaaacaattgatttaagcctaacacttaaatttgaaaaaagggtatcatcaaaggctactattcaatataacagaccttgcaaagtatattaaccctatgaaattaaatgatgaattaactaattctatcgcatcagtcacagaagctgctgctattgcggctatgccatgggtaggtaaacaagataaaaatgcggcagatgctgccgcagttgccgccatgcgagagcgccttaatagccttaatatcaatggccaaattgttattggtgaaggtgaaattgatgaagcacctatgctctatattggcgaaccagtaggcaacggccaaggtgaaaaaatagaaatcgccgttgatcctatcgatggtactcgcatggtcgctaccggtgaaaataattctttggctattttagctgcaggttttgaaggtagttttttacaagcacccgatatgtacatggaaaaactggttgtcggtaaaaaagcagcaggtgtgatcgaccttaaccattgccttgaatataaccttgatgctattgcacaaacattaaataaatcattaagccagttaacactagctattttagataaaccgcgccatcacgatattatcattgatttgcgtaatagaggtattaatgtcatcactttgccggatggcgatgtgcttgcttctttatatgccacaatgcctaataatcctattgatgttatgtacggcattggtggcgcgccagaaggtgtaattagtgccgctattgctaaagctttaggtggtgatatgcaagcgcgccttattacccgcgatattgctaaaggtaataatgcaacaaatagagaaattgcagcacaagaaatctctcgatgccataatatgggaactgatgttaatattacattgccacttgaaatattggtgcgccatcaggatgttatgtttgcagcaaccgcaattactgccggtgacctattatccggtgtcactgaacaaagcgattatttgcgtacacactcgttagtgattaatggctccacacactcattacgttatatcgaaaactatcatttacgctaacacgagaataacaactaaaaaagcgacacgggcttacgtgtcgcaaaatgtatttaaggggtatttatagttataattaattcatgctaataaattagctggattatcaatacacagcttatctattatcgtcttatcaatgccacgctgtgctaataatgaaagaaaaacgttaggcacaaaaccccaaccatttccgccattttttgcccacatctgttttaaaaacacatcatgacttaatacaatttggttaccataacctctttctattaaggttgcgacagcttcaaccgtatccatcacactgggtgccgcgccttctttagggaaagaaatatcaagacctatcatgtcaaattcaagccaaacacctcgatcaagcattttgcattgataatcgatatctttaccagaaggatctgaatgggctaacgatattttggctggatcacaccccatttctgttaaaagaatatctaatacttcatcaccacggcgttgccaacctggcatatgaatattcattgaggcataagggttattattttgagccagtgcagcggcacgtaaactatttttttcaccatctgtaaagaaaggagatacaccaatttcgccaatcataccagcacgaatatctgtaccgtcaatgccgatatttaattcatcatcgatcatttttgccatcgcatcaatatcatcagctaggcgttttccttcaaatttctcaatataaaggccggaagaagcaacgacattaatccccgttaattctgcaacttgttttaattttctaatatcacgaccaattgacgatgaacctgtagcatcaacaatcgttttgcccccaagctctttaaaattatttaattcaaaaataacgtcttcaatgggttttttatccatattatcgcaacaacaatatggatcgtattttagtccccactgaatatctgcactgacttttttatctactaaaacgtgtgagaattcataaaaaggttcatcaacaacgccagataaatcattaaataaatgttcgtgaggtagtgtcagccccatatccgcttttttaaccggacccgttaccgtttgaatataacctttcatgattatgcccctgctctttttactgatttagtcgctttaaactcaggaatggtagtaacaatggcgccgactaaggcaaataacgtaccgatgattgtgactaaataaacagtatttcccaacgaaggtaataataggtcaattaatactgaacccagtaattggcccgcagttgatgcaacacctaacattagtaaccctaagcctcgtactaaaatagccattaatgcaatagacattaaccctaaaggcccacctaaatacatccaccatgtagcaggaagctccagtgttatatgccctaacgccatacgtactactaacgcaatcgttaaaacagtaaatccaacaataaagttccaagtaatagaaaccatcatcgaacctgttgcttcagccacttttgaattacctgctggttgccatcccgctaataaacccgctaaaaaaggtagaatagctaagtaaataaaagaggttgaatgccactgcggagaaacgacaaaaagagtagcaacaacagctaatacggcacctaatacacgatatggggtgaagtatttcttctcatccacacctataccaaagcggtcacataataaacctgataataacagtgctgaaattaatgctgtttggaatgtagctattcctaatgcactggctgatgctccttcagaaaaaaccaccattgcgccacagaggccagcaaaccagttccataatggaattttacgtgttttaattaatgtcggaatagaagcaaattgctgacgatattgttttttggacataatgataaaaaacatgaccactaaaccactggcaaaagagataactgcactagcattaccgtcttttaatacatgtcccagttgcccattcaccgcagactgcattggtgatagcatccctgctaacacagttgctaccatcagcaagggtgttgataaattttttgtactcataagatgttccttttggattattgactatgagtgatttcttttttatttttcaagtaatcggttattttgttattagcgcagagtgtatctccgcgcttttttacttttcttactgctattgttattaagaactaacgtgcgatttgctttagaatattgacccacatatcagcataatgtggccatgctaaaaactctttgctcccccaatgcggtgaacagtcactcataaaacaagctgtttttcctttttcaaattgaccaaacaccagtagtggatcttcgccaatattcaaaaccgtttcagtgttatgtttagcgaacactttgttataaccaaggaacatcggccattcactaaaaccttttatcgtggcatgctctgcattaactggagttgcgaatactccttctggggcttccacacgatcatcaccctctaacatttcaacaggtaacacttgtgccaataaggtatttttatagtttgctttcgcttcaatacccataaatgatagatagccgccaatcattaataagccaccaccattagcaacaaactgtttaattagccctaatgcatttggaagtactttcatgttgtagaaagtatcgttttgcaagaggaaagtattagcaccaatatcactgatcacgatgacatcatattttgctaattcttcatcagtctgaggaaatgcgacctgaacggtatgtgcaggcatataatcaactgctacccctttttcccttaaacaatttaataaaaaagtggcaccttcctcatatttactagaagtgaaactgtcgtagccttttgagtggatcatatgaatgtgccatgactcaccaataaataagattttcattttttttcctctttcaaaaagattatttattcaggggattgagtgacaatctgtgaatatgttgtttgattgatgcgatgcatgacattaatatcttcaggcatttctgaagcattactcgtctcaacagctagtgatgcaaaagctgatgcatagcgtaacgcgtaagaaaactgttttccttttgctaatgaggctgctagtgcaccattaaaagcatcaccagcgcccgctgtattttttaccaccgcaggataagctggtgagtaaatatatttataaccgtcataagctaatgaacctttactacctaaagtaatgacaactttattaacacctttttgataaatagcattggctgcatttttagcagatactaaatcaacaacttcaatacctgataataagctggcttctgtttcattaggtgttaatatatctaacattggcaatagcttatcaataactttattgtaaggtgcaggatttaaaataatgggaatattattttcattcccgattgaaataatttcctttaatgcttcaatattagtttctaattgcaataaaattatatcggcatctataattttatctttttgtatttttacctcatcagaagaaatatccatattagcccctgaataaatagaaataatattttcaccactctcttctgacacaaagattgatgctgttccagtttgatgattttcagtttgatatatcgttgatgtttttattcttgatgacgatataaaatttactgcataatcactaaactgatcagtaccgattttggtgataaaatgcacctgtgcatcagcataacttgccgctaatgcttgattacatcctttacctcctggtgagaagataaatttattcgccaataaagattccccggtttctggcagtctgggcaaataactaatcatatcaacattaaatgaacctaatacacatactttatttactgccggctgccccgctaaattaattttatcaatttgatcattacattctaaaaattgtatgatttcttttttggcaactttgtctaatgtttcaaattcaataaaggccccaccatggcatcttttaattattcctttctcagccaatgtatttaaatctgatcgtatcgtttctttggtaacactaagctcttttgctaaaacagaaacttttactgcaccatgacctttgatcagattaacaatttttttatgacgctctgctttcatttaatgttacctctatggcaacaactttaatttattagttgttatgggattgtgattacaatcatatgttatttattaaaagcaaaaaaaagcagaaacacaaaaataaaaaacaaaaaaaagcagaaataaataatgatagtaataagattacttaatatatagaagccatctcccctctcataaaaacacaaataaaatcaaataataaaataacaaacactatattgattataaaacaatctaatattaattatttgttttttaaaacttaaataattaacttaaaaaacaataaaaaataaaaaccttattttataataatttagagttactagaataatcaaaaataaaaacaatcatcactatgtttaaataatcaactattttagtgaatcgagcaaagcttaaaataaattaatcttccatttttatagttcataaattagtacaattcttcttaccattaaaatgtatagccaatgataatgtaaattaatcatgtcaacttataattagaaatacagatacaatgattaaaatagaagcagtttttattgtctcattttgtgaggtagataacattaataacaacagtcattgaacaaactaagtataaataacctattttaagtaggcaaagtaagtaaaaatcttgctttatttattgatttatttttttactcgtcaatctttggcttattttgtaaatagctgagaatactaaaccactaacagcaactcactgatacaaaatataactccaataaaaaataaaaacttagatataaaaactaaaaatcaaaaaattcaagaagataaaatcagcaacaatgtgttctaaaatatctaatacctaaatagattgtaaaacaacctatttatcagacatattccgacacatttattttctagcgatgtttaaacttagtgtctaagattataaatataaattgagcaccaataatctgataaatacacaacgtaaagacataaggatatacctatgaaaataaaatcacttattgctatttcattattaagtgttagtgcttctctttttgccgctgaaagcaccagcacaacacaacaagttcaaggcgtaactcaagcacaaaaagatctcaatgattatgaaaaagtcatggtagaaaaagtttgggttaccacgcaagccattgacgagaaaggcaataaagttgacgctaataatccacaagtcagtaattattttggcctagcagaatattatcctaatggcacttttattatgtttacccctgaaggtaaacaaaaaatgcaaggggattggtcaatgtctaatgatggaaaaacgcgtacattagttgccaaagatgcacaaggaaaaacactatttactcgtgatgtagaaaatatcaccatcaataatgatgagtatacctatcgtatttacccaactgaaggggataatactgtttattttgatattattcatcacgttaagaaataatcataatacgttgtttcacctgttataaataattaagggctattttatggtaagtaaaatagccctttttttagttgtatgaccttaatataactagccttaaatcaaattttgagcttccccatcaacccaataaatcacattaagcgcttcttctggtgttgggacttccagtttgctcaacattctttccatcactttatcgggaaccgcttcctttcttgcgctgttttgttttttccattgcaaataagggacttcaatatataccaatgtcactttagcttgataacgataaaacagagcaataagttgattacgcatttgtttagtaatatttgttgcattccaaacaaaaggcttatgctctcttaaatatattctcgcttgctctttggcaagttgtgcaatccatccattcgcatcacgatcatctggttttatattatgctgctgacgtaatgcatctaaacttactacaggcatatctgcacaatattggcgaatataactatctttgcccattcccggtagcccacaaagcacaataacttcacttccttgctcaggataaggttcatagtgaggatcgacactattttcactatgaaaatagtgaaatcgagcgccatcagaaataaatcgtgcgggtgttctccaacaatttaattcttcacagtaaagtgtaaataacgctattttatccaataaagagggcttatcttcacagcttcgtcccagaacatccgccttagccagcaatgccaataaataacaatctacccttaacgaagccgctaataaggcttttttaggatcgggtttatccattaaccataaaggtaatccgtgatagcgtactaatgccgcaatctgttctctatcaataaagctaaccggcactttttcatataaaaaacgtcttgtcgttaattctcctttacgagcatggcctggcgaaataattcgcccattctcttcacgggtagttgaacgtttttctacatcatgtaaaagtgctgcaatccatagaatttgttgctctctttctgacagctcttggtattcagggagtgattttatagcgtggatcacctgctgtgtatgaatagctacatcaccttcagcatggtggatcggatcttgtcgaacaccggacatatcactaatttcatcatagtactcaccaagttgttcccatgacatttcgctatgtaattttttatgaagcatcatgagactcctgtgttttttcccaaatcagtggcgctcttttccaattacgtttccaatgcacatctgttttaacatgatcttttctcacatatttaaacacccgatgtgaaaattcatctaatgaaaatgcttgagcatctcgtgtgacaatgccttccatcgcacttggtttcttggttaacacatctcgtgattgaaaagagctatgcttttgtgcgtgtaaaataatattcttttcaaactctattttattttccgattttggtagcgagatttccggtacggtgggtaaatcaaataaagtggcataaaattgcacttcttcccaacttagccatttatcctgacaacgtatggcaaaaacatagaaatactcttccaaatgttggtattcaatagaatgaatggcataaagattttcaccaaaaatatctaaattacctaaatcatttctgatggattgccaacgctggcgtagttgtactgtccatgcagattgtgtcggagtcgcatgagagcgagcaaaaactcccattcgatttaagcaattattttcaccatctaatttttcagtatgaataagatgctttattttgcagatatcttgccaccaattggcattaatacgatcatcgcttgttgtgcctggtgaaaaaggatagtgatatgttctgtcatatttttttgattgattattcattgtgttatactcattaagtaacaggaaccctactaaatttatattaaaattcagtgagtatatttatctgtatttgcactatttatcttcagtgccttaatgcgtattacataaccacaacctaataactcaaaaataacaaaagaaataatttttgacatactacctgtattatcaagatagcactagaaaaaaatgtttatatttattattcattttctctcaatttttttcgttatttaacactccatgatgattgttcatctatccttaatagggtgacaacgctaataatgtcactctatgggtatttatacttaaataatgataaatatcttaatcctcagtcgctgtttacataacgatattgcacatgggaggtagtatgtatcacgatcttcaaggaaaagttgctgtagtaacaggttcgtcacgaggaattggtgcagcagtagtgacgagattagttcaagaaggaatgaacgttgttatcaactatcactctgatgaaaatgaagctcaagcattagccgatagcctaaatagacatggtaaaggtaaagcgattatttttggcggtgacattagtgatgaaaaaattgctcataactttatttataaggcgattgaccactttggtcagctcgatcttctgatcaataatgcgggaattgagacacaaaccccttcccatgcagtgaatttagaagattggcgtaaaattattgatataaatttaaccagttattttctaacggctcgctccgcattgaaatatttcgttgagaataagatcaaaggcaatattattaatatgtcttctgttcatgaagtgatcccatggccgacttttgctagttacgctgccagtaaaggtggcgtgagaatgttaacgcaatcactggctcttgaatatgcacactatggtattcgtattaacgccattggcccaggtgctattaataccccaataaataaagaaaaaatgcaagatgatgcgttacgcaaagaattagaagagatgatcccaatgaaatatgccgcagagcctgaagcagtggctaatgttgctgcttggttagcatcggagcaatctacttatattactggacaaactattttcattgatggcggtatgacactttatccctcatttcaaggtggaaaaggttaaagccgttcactgtcgtccatactgttaagataaccttctttccaaattttgcggtttatttatacttattctttgggaagaaggcttttatccttattttattcaatcaaaataacattttcggaatggataatattatcaggaaaaataagtgctctttcagaaataaacggcatatgtaatgtacgtgtgcccgttgaaatagaaacccctgcttttaaccatgcatcagccaccagctctgtacaaaaaacacctttatcttgctgaatactgaagttttcccctactcgatttaaaacagcttctaacgcttgttgtcgtgcttgttcacttccacgcacttggtaaaagcgtacagaattaggcttagcacgactgataaagaaatccaaactatcgatagtaacaccatctttactatcagcatgttcactgggtgttgagtgaacaacctgtataccttgctcagttatccacaacattcctacgtggctgaacccgctgttatcaacttgctttattatgtcgctaataacttcatcaccatcgcgaaaaaccagatcaccactttttaactgataagggaaagcgagcacagtcaatgtgctcgctaagtataaagttaatgcaagagtaaagcgtattatcacttaacttcaactttccatttgccatcaactttgatcatattttgattttctgttttttcttcaccatttttcaacactgttttgagtgtgacaacggctttatttttatcttcgctgtattcaacttttgctacttcaaccttacccaagccaccttgctctttaatttttttgcccgcttcggcaacgatcattttaaatttgccggtaatttgctctgccattggatctttttctaaatcaccaaaatacattaatgacacagccttatcaccatcaccggaagcgacagcttcaataaattcaaccgcggcttttcctgcttcgtcttgtttatcaccacatgcagataatgtcatcattgccaccgcaagaaacataaatcccatcattttctttaacataaattcaccatcaccataaatatttaatttaatacaataagcatcttatataaaaaggaaaaccatctcatacaacacactaatttatttataaactatgtttgtgcaatagaaaaataacttttctatcgcggaattatacgtgacattaataggtttcgtcataaattttttttaatatagaataatcctagtaaaaaatatttgaaaaaatccccccaacaatcgagtaaaatatttctatctatatttataaaaaaatattgaatatataatgaatctaaaagtgagcagaaacattattaccatataaaacttttttatgttctatttttgtatttttatctcgaaaaaagaggatcggcaacgcatcacgctgtcgccattaacagattcaataaaaatagttatctgttagcaaaataggtaaaatgccatatcattgacaaagcttattttaaaacacacaaagacagtatgttgcaaaatcagttacgatagtgatacaaaattacaataatgtttatctcaataaaacaaatctatttgttttttaatatttaatcatgatatgacaacacgattttctaagtagacctataacatttcggtgtaaaatacaaataaagactagaaattttgtgacacaatgcgcctttttacaccattaagtcaatttaagataaatagaaactgcattttggatcatgaataggtaatctagccatctgatttcaatgaccaaacatgaatagttataagggtatgctatgtttacttcacagctcatgctggtcggttatgttttattagtcagtccatgcgggcatgattcttgtgatgcggttccagtaacagaaaccatttataccaaggatgaatgtactattcgcttaaactatctcaaaaagaaaagacccgatctctatattttttgtggtgaagtattacgtgatcccgaagtgaccgatgaaaatccatacctaacaccgccaaatagcgccgatgatgtctttcaattaaaataatcaccctttttcgttgaacaccccacaaaatacaatttaatttgttttctagttacggtatactctttatacttaaaatatgtaaggacacgtattaggagtcactcatgtctattgcaaaacgcaccaaagacaaacgtattgcgttaggtttaacacagtctgagcttgctaccttggctggtacaacgcaacaatcaattgaacaacttgagagtggcaaaaccaaacgccctcgttttttacctgaattagcaaaagcgttaaattgtgaattatcgtggttgctcgaaggggataataaacaaacacacgcttctgaaatacctccccaagatgaatggcattcagtcagtgaatgggataacgatacccctctcaatgctgatgaagtcgagatccgttattttaaaagtattgaacttgccgctggtgatggctgctgtactaacgaagatcataatggttataaattgagattctccaaaagcacactacgccgctatggcgcttcaccacaaaatgtgatctgtttttccgtctatggtgatagtatgtctccggttattccaaatggttcaacagtgaccgttgatacaggtaatacgcggattgtggatggcggtatttatgctatcgaacaagattcattatttagaataaaattgctctaccgtcagccaggcggaaaattaattattcgtagctacaataaagatgaatttcctgatgaatttgcagaaattgactccgttaaaattatgggacgcgttattcactggtctgtgatggcttggtgatcatctgcatatttttattttagtttttactttcttgcacaattttcccattagataataacagcgttttatctgctaatgcttgcaattcacgaggctcatgagtgactattatcatcgttatctgctgtttttttaatgagataataagctcccacagctgataacgtgtttcccaatccaaacttgaaaagggttcatccattaataacagtttgggttggctaatgagtgctcttgctaatgcaactcgttgctgctctccccctgatatttgagatggataacgtgttgctaaatgagcaattcccatctgttcaagtaacgctatctctttttctttactgcgcttttgcttagccgcatattgtgccagccataaattttgctttacagtgagaaaagggaataaataaagacgctgatttaaataacgacaggggcgctgccaaacaggtaatttattcatattttggttagctaaaacaatatcccctgtatagccggtataacccgcaatagcattgagtaacgttgttttgccgctacctgatgagccactgatccctaaacaacacccttgctctaggtgtaatgaaacctcggttaaaataccggtagttaacgagtgaatggttaacatgctaatttcctatcacgctgtaaacggtgtaaagcaaacaatagagtaattgcaattgctatcagtactaaagcgcaacctatcgcaagcgagaaatcaccactcgctatatttaaatagattgccattggtaaggtttctgtttttaatcgtgtggcccctgccaacattaatgttgccccaaactcccctaatgctcgagaaaaagccacaatacaaccactgattaatacagaccaacaaagtgggatctcaaccaaaataagcgtttttgttggtgttaatcctaaattctgtgcggtttgaatataagcaggatcaatggctttaaacgccgcaaggctattacgcataatgattgcacttgccacatatgtttgagcaataataatccccaagggagaaaaaagggcgcgagataattgagggaaaacccctgttaaaggcccttgatgacctaacaataataataatccaatacctattaccaaaggaggcgtgactaagggtaaatcgagtaacgcatcaataaaacgctgtcctttaaatgacgatcttgccatcacccaagctgcaggtacagctaagagcacggctaaacacaatgatgttaacgcggtgctcagtgacatcaatacggcaaaatgaaattcagcatcagtaataaccatggtgagttcgtgataagagagttggcaaattaatgcaataagtgatcccaatatcaaaaataataataataaaagtggtattagtgcccaacgatacacagtgaagccttctcttaatctactaatgacatttattgtaaaaatgaaaaaagccacctgtgagccggtggcaaaaatacaaataatgtgagaaaaatctatggttttgaaataacaggtagaaaaccataatcagtaaaagcctttattccttcgggacgagaaaaataatcagccaattgttgtgcttgtgtggggtttgttgaggtttttaacaccgctagtgtcgcaatttcttcggggcttccttcaggtatgggtaataaaactaatttatcttggtttttcattgcatcagcgtaaccaataatggcagcatcaacctcaccatttaataaatacataagtaactgtttaatggttgctgtacgaacaaccactttatttcgtaactgctcaccttggcctgacgcttcgattaattgttcaccgcttttacctaatgcaattgcttttgcatctcccatacctaatttcaatgaactatttgcaagatctgtaatagttttgatctcaccgattttatcttttctgacagcaataacaggaatatgacgcacaataggatattggctaaccacctgattttgtttcgctaatttttctacatactcttgagagccgggaaaaaacagatcaccttgttgagtgagattaaagcgtgtaagaatttggcctgaaccgccatattcgatagtcactgtattgccggtttctttttcaaatagaccaacaacttgctctacaggctgttttaatcctgcgccagcataaagatgaagctctacagcaaagctattatggcaaaataatcctagtgcaaaacctaaacctaccaaaacttggcgtttcataacatcctcaaacacaatatcgttatataattttttatataatgatagatatgagaaattaaggcaagatcttagtaagaaaaaaacagcaaagtgctagcaagctatcattttacttttcatctctaatttatttattaagatatttttatcactctgtcgctagaataaaaatacataatcactcatattttgatatgcaatctagatgaaaaataacagcaatattaataacaaatcctcgtttaaacgaggatctcactattaaatactcaattccaataatgctaatgccgtcacttcatcgatgacaatatctgtagcatatcccccttttattgcgcctatggttgcagcaacattttcaacgcctccagcaataaaaatacgctgtgggatctgtcttaactgtgcaagactaattcccataattctaaggtcgatatcagaaagcagaggattaccttgtgcatcatagaatcgaccacaaatgacaccaacagcacctaaatcgcgatattgtgccatctcatttgtggtgagtacgcctgttgtaatcaaaggattgtcatcttgagtattacccactacaaacaaagctttattacattgatttaaagcagagaaattacgccgtattatgggttctgcttgtagctccattgccaaacgtgcatttgacactacagccggtacatgcaaattaatactgcaacctgaaaacttattggcgatcaaagcggcagattccgcagtagtaaaatcaggttgtggagctacagccccaatcatttgtaacacagtgacattttctagtgttttagtggggagatagtgccctagtttatggattgttcttccccaagctacgcctaaaatatcatcattgctgattatctgagaaagatacatagctcctgctttagctaatctttctcgattcatatttgatgtttgttgcgatttattcttttcttcatcaggtaaaataagcacattattaagattaaattttgcttttattctgattgaataatcaatcgtagaaaatactgatgaatccaagcttatattaacgaaacctttttctctcgcgagatgtaaatacttcacaacagtcactcgagaaacgctcataatatttgcaacttcactttgactgagtccgtcctgatagtaaagccatgcagcataaagaacgggatcattatcaaataaactcgcattttttagcgaattattatccattttaaaccccactattttttataaatcttattaataattaatttattttatatttacgatattgcagaaggtaataacaatttttgttgaatatgttcttataacacaattagatacatttcatttaacaactactaatatcggcaaatgggtgtttttctttacaaaaagaaactgaaaatatgtaaaatcaacttaataatgccgtaattatctcatatcgagaaagttttttttgaaaatatgtttttattcggttaaaaagagaaatcttagcgttaagttttaaaaagttttattttgatgatattaaagttaattaccctataacaaattaaccatagactcattaatacagaggaaaaatatgattatcgcttattcaacagcccctaatgaaactgtcgcccatgaaatagctcaccatcttatacaggcaaagcttgcagcttgtattaacgtccttcctaatatcaaatctatctatcattggaataatgaaattgttgaagataatgaggtacttatgatgatcaaaagcgagagttcaaaacaacagattttgattgatacactagtaaaaatgcacccttacgatacaccagaagtcattattgttcctatagaaaatgggtttcatggttatctagaatggatacatcaaagcctaaattaatgattatttcattgcattatcatgctatttcatcttatttgtgataaaaatgatagaattttgtaaataaaacaacacttacaatctcaataatgagacaaataaacaaagtaaaatattaagattaattactatttaactgctaaatcatttttaaaaacttttctttttgagattatctttatattcacagaaaaaatataagcaataaattattattaaatttttataagtcaaagaaatgaacaataatacgctaatgagcaaaggaaaaaataaaaaaacaacaaactggtttttataggttattatcctaaagaataaatttaaccgatatcttaccctggttattttctgttataattaacaagctttctctatattacatgtaaaaaaggagtgagttgtgaaaacaaacagagtcgcaagacgtattttaggtttaccttataatttaagtcggtctaaaaagaaagtgcgtttttccattattacgcctacagaaagtgataatcttcccgcagagttaaaaaatgcaactcggatctgtttaaaacaagatttcagaaaaaatgcgcaaaataagcgtatttatatgaaattaaccgatgcttatccagattatcttctagtaagttaattacttatgcctaatgttagattataaataacttttattttattatttataactaatagtttatcccttacaaccttgtaagggataatagtattctattattgatataattctttacgaatattcactaatacttgcttaattaattgaggattgattttttctggtaattgactttgttgaaaagcttgctcaattttttctattaatattttacttcgctcaaataatgtttcataacttaaagccccagatttaatttctaacaattcatccctgttatcacaccaaactttgacttttttttcagtggcaattcctaatgcaatataaagcaacctaaaagtgtgcatcatatttttactatcgtaacttcgtccatgttcaatattttgctgatagcgggcttcattacgctcctcaacccattgccaataagcatgatactgcttgcaataggtactgtagccgtctttattaaaactaagataggcttgtaatatggctgtttcagagacactgcttagtaaaacatcggtggcattatctttttttattacgccttgataatcactatttggatcataaaaaactgcataaagattttgtgcatgattgattttaaccaacccaatattttgctgctcccaacaacgttttttaagccaattattcagtaataggctttttccattttcaatgatataacagaaatcaaggatcgtttttaactctttatctataggatccatgattttcttatttaacccttgcgctttttttatttgcccttgagcataatgcacaaaagtctgtacgcattcctttgataaaaaccattctgggttaaattgcataaataatggatgacgataaataacaacatgctctggtgcatttaataattctaaaatattaggattagacgcacacagtaattcaacaaatcgccctaattcataataaacgatatcattagttttattacttacttgtggcacataatcagagcaataaaacatctctttaggtagataaaaaacacctttaatatcagtatctgaactatctgttgccaaattttgtgaacgactacctgaaattgtttcaaataaaaggtaaggctttatattgtcaatggtcagtttcatcaagtattttcctaaaccaattatttaatatttcactatctggtacggtgcgtttcgctaattgagttgctgtttcttgccataaaaaagtgatcagtttttgcatattatcggttggtagccaagtaaagtgttcatctttatctgctttaaagctcactaactctcgaataattatttgctcatctgtggttaatatatttattagctgattaagctccatcggtgggatattccccgtttttactgtccaataagcagctaaaagtgaacgtaagagatagaaatatttttttaattttatgggctcatctatcgctttacttgcatgactctcttcaaaatgatgtctactaacggcttttgcgatccctctataatgatgaacaatgatttggggttgataatataattgtgccaactcaaataattctttttggataccagcatattgttgataaacaataggtgattgtaaccactcaaataagatagcatttgacttacgtaatagatgcaatgctttcgtaatatcccaagctcctacatcaaaccaattattttctatccactcaaatgtttctttaggtttatcaattgaaagatatgcattgcgaggccgtataaaaatacctcgtacatcatagtcactatccgttgatgcgaagccccaagcacggcttccactttcagcaacataaagtagttttatttgatgcgtttgctctatttgtggcagtttttttaatatctgattatgcatgatgatgttactcggtatttccttacaactcttaaatttaataatgttgccaattatgatgatgactagagctaacaatagcaacataactactttagtgtcttaattttataatttatattttgataccgtcgcctataccgtcatttttttcggttcttgtcaaccattagcaaccatagaaaacaaaaaagccaccagtaacatactgatggctcttggttttttaacctttatcaactagtgctgataaacggtattttattcccactcaatcgttgctggtggttttccgctgatatcataaaccacgcgagaaataccatttacttcattgataatgcggttagaaacacggcctaagaaatcgtaaggtaggtgtgcccaatgtgcagtcataaagtctacggtttctacagcacgtaatgaaactacccagtcgtatttacggccatcgcccataacacccactgaacggacaggtaggaatactgtaaatgcttggctgactttattgtataaatcggctttatgtagctcttcaataaagatagcgtcagcacgacgtagtaaatcacaatactctttcttgatttcacccaatacgcgcacccctaaacctggtcctgggaatggatgacggtatagcatgtcgtaaggtaaacctaactcaagtccgattttacgcacttcatctttaaatagttcttttaatggctccactaaacctaacttcatatcttcaggtaagccacctacgttatggtgtgatttgatcacatgcgctttacctgttgcagatgcggctgattcaatcacatcaggatagattgtgccttgtgctagccatttgacttgcggtaatttaaccgcttcttcatcaaagatttcaatgaaggtatgaccgataattttgcgttttttctccggatcgttttcaccttttagcgcagttaagaaacgatcttcagcttcaacatggataatattgaggtcaaatttgcctttaaacatcgccataacttgttcggcttcgttaaggcgtaataagccattatcaacaaatacacaggttaagcgtttaccaatggcacgatttaataataatgcggtaacagaagagtctacaccacccgatagcgcgagaataacgtgatcgtcgccaatttgttgttttaaacgagcaacagtatcttcaataatcgccgcggatgtccataatgcgtcacaaccacagatatctaacacaaagcgttttaaaatggctaaaccttgatgggtatgggtaacttctgggtggaactgtacaccatagaaacgcttctcttcatttgccataatcgcaaatgggcaagtttcagtgctagcaatagtgacaaaatcagcgggaatagccgtaactttatcaccgtggctcatccatacatctaataaaggtttgccatcttcacttacggagtcttgaatatcacggaacagttcgcaggtttcgcggatctcaacttgtgaataaccaaattcacgttcacctgagacttcaacatcaccgcctaattgcatagacatagtttgcatgccatagcagatgcctaataccggcacccccgcattaaagacgtattccggagcgcgtgggctattgtcttctgtagtactttcagggccaccagacagaataataccattggggttaaattcacgaatttgttcttcggtaacatcccatgcccagagttcacaataaacgccgatttcgcgaatacggcgagcaataagttgtgtatattgcgaaccgaaatcaaggataagaatgcgatgattatggatatttgctgtcatttgtggtgaattccaaaacaaataaaaagtcattaaattgaaaggcttgttaacattttctgttttcaagcctttctcgaataattacatacctaaacgatagttaggcgattctttcgtgatagtcacatcatgaacatggctttcctgaatacccgcaccactgatgcgaacaaattcagctttggtatttaattctttgatggttgcacagcctgttaagcccatacatgaacgtaagccacccatttgttggtgaacgatatttttcagtaagcctttatatgccacacgaccttcaataccttctggtactaatttgtctgctgcattatcagtttggaaataacgatctgatgaacctttagacattgcgcctaaagagcccataccgcggtaagatttataagagcgaccttggaatagctcgatttcacccggagattcttctgtacctgcaaacatagagccaaccattacacatgctgctccagcggctaatgctttagcaatatcaccagagaaacgaataccaccatcagcaatcaccggaatattgcgatctttcagtgcttcaacagcatcagcaatcgcagtgatttgtggaaccccaacacctgttacgatacgagtggtacaaatagagccagggccaatacccactttaacagcactcacacctgcatccgccagcgctaaagccccttctgcggttgccacattacccccaataataggtaagtttggatataaagcgcgagtttcacgaatacgctgtaataccccttcggaatgaccatgtgaggagtcgataagaagaacatcaacaccagctgccactaatgcggcgatacgctcttcgttacctgcaccagcgccaaccgcagcacctacacgtaaacgaccatgctcatctttacatgcattaggcttgcgttctgcttttttgaaatctttaacggtgatcatgccttttaagtggaaatgatcatcgactactaaggctttttctacgcgcttctcatgcattttttgcataacaacatcacgcgcttcaccttctttaacggtaactaaacgctcttttggcgtcattaccgcagtgacaggttgatctaaatcagtgacaaagcgaacatcacgaccagtaataatacccactaattcattatctttagtcactaccggatagccagcaaaaccattacgctctgtcattgcttggacttcgcgtaaagaagtttctggtgttaccgtgataggatccgtcacaacaccgctttcatgttttttaacacgacgaacttcttcagcttggcgttcgataggcatgtttttgtggataaaaccaattccaccttcttgagctaatgcaatagctaaagatgcttcagtcacagtatccattgcagcagaaagcataggcacatttaagcgaattgtttcagtcagttgagtagataaatcagcagtattaggaaggacagtcgagtgtgcaggaactaacaaaacatcatcaaatgtaagtgcttcttttttaattcgtaacatagcaatatctcaccaaggcggcttttaagaaatggaaaatattgccgcggcattatacacaccgtaatcggttgcttctagctttttttgaaaatttttattgatcctctggctaacttaggtagtatcagtcaattaagtctttgttttaaaatttgatctggctcacatgactctaccgataaacaataatatttttactgttagccgtctaaataagaccgttcgccagttattagaaatggaaatgggtcgcatttggatcagtgctgaaatttccaattttactcaacctgcttctggtcattggtatttcacgttaaaagatacccatgctcaaattagagcggcgatgtttcgcggtcaaaacacaaaagtcacttttcgccctcaacatggtcagcaagtattagtacgtgcgactatcacgctgtacgaacctcgtggtgattaccaactgattgtcgaaagcatgcaaccggcgggtgatggattattacagcagcaatttgagcttttaaaacaaaaactaagtgctgaaggtttatttgatgctcttcataaaaaaccactaccaacacctgctaaacaaattggggtgatcacctcctcaactggcgcagccttacacgatattttaaatattttacgtcgtcgtgatccctcattacctattattatttatcccacagccgttcaaggtgcggaagcaccaatgcagatagtccatgccattgagctggctaaccgtcgtaaagaatgtgatgtgctaattgtcggccgaggtggcggctcattggaagatctctgggcatttaacgatgagcgcgtagcccgtgctatttttgctagtgatattcctattgtcagtgccgtgggtcatgaaactgatgtgactattgctgattttattgccgatcttagagcgccaaccccttctgccgctgctgagttaattagtcgcaacaaacttgagctattacgccaattgcagtcacagcaacaacgtcttgaaatggcgatggattattatctagcaaaaaaattacgcgcactaacacaacttcatcatcgcttacaacaacagcatccacacttacgccttgctcgccaacaaaatgtattggctacaactaaacagcgtttagtgaccagttttcagcgcctcctacaaacaaaacagaatcaacatactcagctacaaaaacgccttaattaccaagagccaagccctcaaatacaagcactactgcgccaacaacaacagttaatttatcgtatgagagaaagtatttcacaacagcttgctcgtcaacgtgaacaatttgcaattagctgttcacgtttagaaagtgtgagtcctctcgcaaccctttctcgtggttacagtattagtgaagttgcttcaggtgacgtactgaaaaatacgaaacaagttaaaaaaggtgatacgctaaaaacgcgtgttgaagatggctggatcaccagtgaagtgataaatacacaaaaaatacctgctaaacgtaaaccagcccccaagagtaagtcatccatttaaaccatatacatggcaaccataacaacggcatcttaatgatgccgtttgtgttacttggtaacgatggatagcagaaaacgctttcgccctgctttcagggtatattaccgtttatattaaaaacgaatttctccaccaaacaggaaacttctgcctctagccgtttgtttattttgtccctgttcatccataattggcgctgaattacttctatcaagtgcatttgaataatttttattcatgagattatgtaccgcaaattttaatgacacatttttattcatttgatagttagcgtacgcgttgatcacggtagggattttttcttgttcgaccatgggaatagtgcctgtatcaaaatcaaacccttcagctgaagctttacgacttttaccggtaatttgaatgatggtgcctaattcgagagatcggtcatcgaataacctcacaccagcatcaatcgttgcgtagtatttgggaagttctgatgcaggactttgcccaaaatcccccatcgcaagagaagtgggttgtgaggtgcgctcattgctataagaaagcgtggtataaaatacatcagcatcatagtttacttgtagttcatagcctctcatcgtcacaggatcaaggctatttgtgtataaatagatatttccatcgtattccatgccactgtagtcatcgtcagtaaaagtgccatcgattttacaacgtttaccccctttacaaacattataagaatcactggaaatatagtttttaactttagtatgataccaaagtgcttttaagcgaaagctgtctccagcaacaattaaatcagggcgataactattaaaacctatttggaaagtatccgctttctcacttcttaaaaaggggttcatcgatgccccaccttcattagcaaagaaaatttcctgtgggtttggtgcccttgtcgtatgggcataactgataaatggttcaaattcagggataatttgtgcagaaaagagtgctcccggctcccacgctttttcgtggcgattaacattcatcgcaccttcagggaaacacgctgctttgggatcacaagcgggtttatatcctttaatatgataatccgtatagtttaaatttaatgcgagggtataaatatcgtattcaaattttatttgtgaaaaaagactgctgatgtcgttttttccttgcggagcaaatacattgtattcaatcatattttgtgattgccatggatcgctcgaaggagctgtcacttctcgattataatcaatcgacatcagtttagtgcctaatgttagtgccatatccagctcatgataattaaatcgactggtatttttagcgacaagtgcattggaaatatttttcgcatgtccattgcgtaatgacattaaagagtcaccggcaaatttttgcgaagcttggcttctactcaataatatttcactatcaaaaagatcgtttagtggggtataacgatatttagcataataatcttggctctctatggttcttcgattaaatttattattataaaaccgaccgcttaattctatttcatgagaatcattaggtttaaacgatatttttgctaattcagaatgtggcttttggttaaagtctttagtggttgcaaactcatgactattaaaacctgccccatttttataagaagattcaatattatgtccacttatggcaaatatagcgccaatataaccatcatgattaagtatcggctgttttcctgcaatcgcaaccataccgttataacctaatccattagtccctcgagccgctttacttcttattccccaacgatgattagaaaataaaacatcatcaatacctattgttttaaaattagcactccccgctaacgcattaatactattttcaccatcttgttgaccacgagaaatatcaatttgcacaataaagttaggatcgatcatgctattaaactggttgtatggttgtccaccatgcgcatattggctaggtgacgtgctatacatcgtttgtgtcaccccatcaatcatcatattgactcgaccaaaaccacttaatccccggatattaaccccaacacccggctgactggcatccatttgggtgtaagttcccggtgtagatcgtaatgcttgttctaccgagctaagattattgatttcaccaatagcgctataagcccccggcttagataacgctttttgctctggtgtttgtttttgtgccgatgagacttttaaactactaaattgaactgttttttccgtttcagccgcaaacaccagagaatgaataccagaaaatagaatacaagagccaagtattttccttgttaattgagttttcataataaacctattctttgttttatttaaataggctcactttgctttctataagctaaaagttatttaatttaataaataacgatattgttattattgttttataagataaaaattaatagcattaaccctgtctctcattaaagagagacaggttaatcattaaaaatttaaaaggcttggtttaattacttgatattttgtgtcttaaaataaatatcaggctgctctaacattaaaataaaggcatattctctcgcagtatcacgtagacgattaaaacgaccggatttacctccatgtcctgcactcatatcggtttcaagcagaagtaaattattatctgtttttaattcacgtaatttagccacccattttgccggctcccaatattgaacttgagaatcatgtaaacctgtagtgaccaataaatgaggataggctttggcctcaacattatcgtaagggctataagattttaagcggaaataaacatctttatctgcaggatcaccccactcttcatattcacctgttgttagcggaatagaagcatccagcatggttgtcaaaacatcgacaaatggtacctgagccacaacaccacggtagagttcaggtgccatattgataacggctcccataagtaatccaccagcactaccgcccatcgcgtagacatgtttgggtgcaccataaccttggttaataaggtattttgtggcatcgataaagtcagtaaaggagttgactttatgctccattttcccttggttataccagcgtttgcctaattcaccaccacctctaacatggacaatggcatatacaaaacctctatctaataaacttaaacgggcagagctaaacgaggggtcgatactgctgccgtaagagccataaccgtaaattaagattggattttcgcctttcttaaataagtctttacgataaaccagcgatacaggcacctcgacaccatcttgtgcttttacccaaatacgttcactttcatacaaatcatgcttaaagcctttcacttcctgctgtttaagcaattgtttttctttggtttgcatattccattgataggtagaagaaggcgtagtcattgaggtataaccaaaacgtaactcttcactatcagcttgtggattgacacttagccatgccatatagacaggatcatcaaaaataatatttgttgattgtcctgttttccaatcaatttggcgtaatgacactaaaccttgtttgcgctcttcaagcactaaccaacgattaaacagttcgaagctttccaagtctacttctggctgaggagcaattacggtttgccaaggtgcatcgatagaggccgttttataaagaccatatagctcactttcatgattagagcgaatataaaattcacctttaaaatgatcgatataatattctcgcccttcttggcgaggagaaaaaaccaccatgggtttttctggtgcattggcatcaattaaacgatattcagaggttgtagagcttgcaatagtgactagaatataatcttctgatttgcttttctccatccaggtataaaaacgatcatcattctcttcaaagattttcacgtcttgttttctatcactaccgtattgatggcgataaatttggtatggcaataaagtttgcggatctttatctacatagaacagtgtttggctatcatttgcccatactaaattcgctgaaatattggttaaaacattctcttgccatgttttatctgtcagatctttataagcaactgtatagttacgacgtccttctttatcttcagcaatagcaatacgtttgttatctggactaatggctaaatcacctaattgataaaactcatgccctttagctcgctcattaccatcaacaagaatttcccattctccatcacttcctattggtttacgttgataaataggaaagtctttaccttcttggtaaatggtttggtaagtatagccattataatcataaggcactgaggcatcattttgtgccatacgctcaaccatctcattatagagcgtattttctagtgttttgcccgctgccattactgactcagtataagcattttcagccttaagatagtcaataacttgtttatctttgcgtgcatcatccctaagccaataataattatcagtacgagtgtcaccatgatctgtcatcacatgggggattttattcgctttcggtggcatcataataacgtccttctctgtttgagccattgtcggtgttgcggtgatcaagattgccatcatggcacctgttaatccctgcgtcaccgtttttcttgtcgcggataacatgtttaattccttgttatgttaggattataaagtcaatgtggaaaattcaattgccatttcaattgttatttgaccattaaaaagcagttcttctgggggctttggtaatggctgagcacgcttaataacactttgtgcctctttatctagtgagcgcacaccactgctattaatcaattcgcaggctatgacataaccttgtccatcaacaataaaacgcactttaggtgctcccgtacgcccttttcttttcgcttcttcaggataagctttataacgatttaaatgacctttggccttagcttgccataatgccaaggcatctgcttctttatttgcatcactatcataatttgcagaaacatcgttagcctgttgtttcgcaacagaatggcttgttgagggcgcggataaactcgatacattttcactgacaataggtgaaggtttggttggtgcaattgaaggggcaaccttaactgaagtctggttttgtagcacttttttcggcttttcaagcaaaatatctgcattttcattaataataagattgggttgtttctccgcaatctcttgctgctgctttttttggctggcgacagccatttgctgatcaacaccgacaatctgtttttctttattcaccgcttggacgttttcacttaagctaagcataacagccggtgcaggttgatggattatcaccgggcgttgttgcgtgatataaaaataactaatgactaaagtaaaatgaaatactattgataaaataaagcctgaatatcgacaaggctgtaattgcgccatttggttaacggaagaagagatcaacatatgcgtattatcaataatcaaggatgggctgcaggagttatccacaaataatcggcatgttcagaggtaatatcgctaccttcttctgccataataagtaccgtgactgtttcattaggggctaaatctttaatatgtaaaggtacacccattaatttagtggcatgaaatgagccggcaatcaacagtgcgggcataggggcatttaataaactttttgccattgcacgatcacgcagttgttggatcacggtcattttttcaatttgtgttttatcaagtgcaccaccatgagaaagctcaatagttttactaataagctgacgaacagcaggttgcgttgaatattcaccttcaatattaggtggatttttatatgcatttgtaatatcactgcgatcgatattagcagctaacaatggataatctgcttgtagcccttctttaatcagattgccataccctttccaagaccagcctttattccaattgagtacagacattaaacgttcatcacgtaaatattgtgagctagagtaacgttttttcgtattatcaactaagttttgctgatctggcgtcaacatctctaataaaaccgcaccttgaggacgtttattgggaagttgtgtcattaaccaatactcaatctcatggtgatattgattgtcatgtttttcgccaacaatcacccgcgattggctggctaattgagttaatagcgcattagctgtgattgtctttcctgtacgcgtatcaataatattggctgatgtaataatagcgggagttgtgctaggtacggtgtttttttctactgtactacatgcgcagacagtaataagtgaagctaataacaggaaccatttagatattgaaaaaaacatattaaccttatagttatatttacttatttttaatataggcttagattaatattaataagaataattatcaatatcattgttataattatttgtatttaatgttgacggattgataccgtaaaataaaaacgccttttattaaaaaaggcgctttgcttaaagtggttattttaatcagtttagcgattagcgttgagattgtgtttgtgcttcaaccacagctaatgccaccatattaacaatgcgacgaacagatgcaattggcgttaaaatatgggcaggcttagcaactcccattaacactggacctaccgttaccccatcggagctagtgacacgtaataagttatagctaatgcgcgccgcttccattgttggcatcactaacagattagctgaaccttttagtgggctgtctggcataatatcgcgacgaattgactcaactagagcagcatcagcatgcatttcaccatcaatttctaattctggtgcgcgttgtttaataagctctaacgcttttcttaattttatggatgatgggctgtcaaaagagccaaaacttgagcgggatactaatgctgcttttggctcaataccaaagcgacgaatagtatctgccgccattatagtgatgtcagcaagttgctcagcggtaggatcttcatttacataggtatcagtaataaaggtgttaccactcggcagtaatagtgcattcatcgcccctgcagtattagatccttcacgtaaaccaaaaacatttttatatatttcaaaatgttccgaataacttcccacggttccacagatcaagccgtctgcttcccctctacgtaccataattgcgccaatcagtgttggattaccaataacggctcgacgagcttgttcttgcgaaacaccacgacgtttcattatttgataatattcttgccaatactctttaaaacgcggatcgttttcattgtttacaacttcaaaatctctacccgcttgaatatgtaagcctaatttctgaatacgcatttcaatcacactaggacgaccaattaggatcggctcagcaagtcctaaagtgactaattcttgagtcgcatgcagaacgcggttatcttccccttccgccaatacaatgcgttttttctcttttttcgcttgagcaaagataggtttcataaataaattcgttttataaacgaattcattgaggtgttcgatataagcggcgaaatcttcaattggacgggttgctacacctgaatccattgcagcttttgcaacggcaggcgcaattttaacaattaaacgtggatcaaaaggttttggaataatgtattctgggccaaatgacagttcttgatcgccatatgcgctagcaacctcttcattttgttctgccagtgccaattcagcaattgcatgtacacaggcaagtttcatctcttcattgatagcggttgcccccacatccagcgcaccacggaaaatgaacgggaaacagagaacattattgacctgattaggaaaatcagagcgtccggtacaaataatcgcatctgatcgtaccgctttgactaacggtggtaaaatttctggctccggatttgctagcgcaaggatcagcgggtcgcgtgccatttttttcaccatctcttgggtcagtacccccggccctgagcaccctaagaaaatatcggcatcgttgatcacatcatcaagtgtgcggctgccgttatctttaatcgcataagccgctttagtttctgccatattggcttcacggccttgataaataaccccttttgagtcacaaacaacaatattttcacgctttaaccctaaagcgacaagaaggttcatacacgcgatagaagcagcaccggcacctgaaaccactaagcgaactttatcaatatttttacgaacaatacgtaacccgttgataatagcggccgtagaaataattgccgtaccatgctgatcatcatgaaagacagggatattcattctctcacgcagtttttgttcaatatagaagcattccggtgctttaatatcttctaaattgatcccaccaaaagtcggttctaatgaagcgataatatccaccaatttatcaggatcggtttcattcacttcaatatcaaatacatcaatgccggagaattttttaaataatacgcctttaccttccatcacaggtttacctgctaaggcgccaatattaccgagtcctaaaacagccgtaccattagagataacggcaaccaaattacctttcgctgtaaagcgatacgcagctaaaggattagccgcaatttcaaggcaaggagccgcaacacccggtgaataagctaatgctaagtcacgttgtgttattagtggtttagttggtgtcactgtgattttgccaggattagggaattcatgaaaatccaatgcactttgttgtagtttgtcttccatcttcatatcctttgtatcaatagggtaagggcttggttagtataatggtaatagctcgttaaatcatgatggtatcgacacttttttcaaattagttcatctcatttattataaaccgctcatacctatttctgggtatattattaacccagtttaatttcattatggaaataaacacgaacagaaaaaatacaatctttgtttattatttatctataactaaattaactcttaaaataattaaactttttatattgttttataaatcaataactatttttacttgtagttgcattttaatatagttaaaaattaacttaatacattgtaataaaaggatttatctatcattagaacttttattagtcgttttggttattttcttttttacccgtaacaataattggtgtaatattgccaaccgtcaattttattttcttattgttttaataagatatctgattctaatttttattccttatttggaatttattttttattttctgctgttgaaaagattacgcatattattttttagggagaggggttatgcctagctactcaattatgatagtggatgatcaccctatcatgagatatggattacggctattgttagagcaagacaaggaatttattgtagtaagcgaaagtggcaatgctcaagaagcaatcaccacagcaaaacagttaaatcctgatcttattatgatggatttacaccttcaaggacgctctggtattgatattattcgttctctgcgtcgctgtggtttaacatcttatgtattggttttatcaatttcagattctcgcaatgatgtgtatgctgcattagatgctggtgctaacggttatttattgaaagagtgtgaacttgatatgttgctactcagtttacgtaaagcggtggttgggcgccccgtttacagtgaaaaagtttggcaatatatccaattaagacaaaactattctgatccgctatctgcgttaacaaaaagagaacttgatgtccttcaagaagtggcggtgggaatgaaaaataaacagattgccgaaaatctgtttatctcagaagaaaccgtcaaagtacatattcgtaatatcttaaagaaactacaagtgacatcacgtttagcggcgagccttatcttaattaagcatcagcactaaacgaatttaccccgacattaagtcggggtaattaagttcttaaggaagccattctctcactttagaaaatcactcaatagggacaggataacttaatactttgaagtgattatcgggtaacttttcaatttttaactgataaagctctcggttgataccgttaatcactatatccagttcactaaatgctgactgtacatcactatttctagcccaagcaggaatatctttgacaccataataaaaatagatagtacttttatctgaatcgataggttgtatctcttttatttggctaataaaaaggtgtccataacaaaaatcttgatatggttgccaagcttttcgtcccttctcgcttagagagaacacccactcgtcaccatcgacagtttgttcaattaaaccagcatccattaatgcattcattcgctctaaaacccatggagcatcattttcattactgtaaacgggccatttcccttcgcctaaacacaataaataatcactgttaaaaaatgcctgtagggctgttttatactcatcaacctttttgctgtcttcatcttcattagcccagctaaaagtagagagtaaaagcaatataagactcagtgaaatacttttcatattttcttttaccaacggaaatctttatttctattactctacgttacacaattcgttacacttaggtgacaggttaatatccaatatattttataatgtaaataggatttttcactacaacaaaacctgctactttggatctgtataacacttatacgtattgataccaatattacgtattgtcatataaggaaaatatcatgtctactactaacctgacatacacgatgtacggcataaaaaattgcgatacaatcaaaaaagcacgtaaatggctagatgataatcatattccttatgtttttcatgattaccgtaaagacggtttgaaggaagcattattactcacctttacagaaaatttagattggcagacattggtgaacaaaagaggaacaacttggcgtcaattatctgatgaagaaaaaaatgctatcactgatgtgaatgcagccattgcacttatgcttgataaacctgccattattaaacgtccaattttagtctcttctgataatcgttttatggtaggttttaatgctaatgattacctgacttttacaggagcctaatttttatgtcctgccctgttattgaacttgcacaacaacttatttctcgaccttccgtaagcccagatgaccaaggttgtcagcaactgatcatcgaaagattaacacctttgggctttaccattgaaaaaatgccttttggtcagaccgaaaatctttgggcatgtcgtggtggtgagggagaaaccctcgcatttgcaggacataccgatgttgttcctcccggcgctaatgcattatgggataacccgccttttgagccatctattcgtgatggaatgttatatggccgaggtgccgccgatatgaaaggctctctcgcagccatggttgtcgcggctgaacgatttgtacatgcttatccgcaacatcgtgggcgtcttgcttttttaattacctccgatgaagaagccgatgcgcatgatggtaccgttaaagtggtcgagtcattaatatctcgaggagagcgacttgattattgcttagtgggtgaaccatcaagtcagcatcaactcggcgatatgataaaaaatggccgacggggttcaataacagcaaatgtcactatttatggtacgcagggccacgttgcttaccctcaccttgcacaaaaccctattcatatggcgtcaccttttattcacgagttagtgaatacggtatgggataatggcaatgagtattttcccgccactaccatgcaaattgccaatattcatagtggaacaggcagtaataatgtgatcccaggtgagttatttatacagtttaactttcgttttagcaccgctattacagatgaagaaattcgtcaacgtactgaagcattactacaaaaatatcagttgcgttatcacatttcttggtctttatctgggcaaccttttatcactggtgaaggaaaactactggatgcggtacgttattcagtaaaacactacaccaatatagagccaacgctttcaactagcggaggcacctccgatggacgatttatcgcccaaatgggtgcgcaagttgttgaattagggcctattaatgccaccattcataaagtaaatgagtgtgtcagtgctgctgatttacaacaacttagtcgcatctatcagcggatcatggagcagattattttatgataacccctttaatgttaacgggtcgttctacggatcatttagtgactttatcagaacgacatcatttacagtttaacgcgacaaaagcctttttagcgttacaacagcaagcggccaaagcgggatttaaattaatgcctgccagttcatttagaagttttgaacgtcagttagcgatatggaatggcaaatttgaaggcactcgccctgtattagatgctgaaagtcaacctattgatattcagacattatcagaaggccaacgctgtgaggcgattttaaaatggtctgcattacccggagcaagtcgccatcattggggcaccgaaattgatttttacgatcctttccgtttacctaatgggcaatcattgcaattagaaccttgggagtatgaacaagggggctattttgcacaacttaatgactggctgactgaaaatatgtcagcttacgatttttatcgcccttttaccgataaagagagttatattgcctatgagccttggcatatcagttatttgcctctctcttatgaagcttcacaggcctatactatcgatatccttcgcgctgttttagaagaagagccgattttaggtaaacaatggctattagataacttagaaacggtttatcaacgctatattgtgctaccagaataattagattttatttatcttaggagacatcttgtttatctattacaggaagtctccacataaatatcaacagacaggctaaaattatcagcaataaaattctcacccaccacattgagaccaaccatagcgagatagcaaaagtcactaaaatgactaaaatagctttcggcttagcccccttaggcatggcgcgataagtttgccaataacgcaaataaccaccaaaccaagagcgatatagcaaccagtgatgaaagcgtgttgatgagcgagaaaaacaccatgcagctaataacaaaaatggtgtagtgggtaacacgggtaaaacaacacctaatgtggctaatccaacagataaccaccctgctataatcaataatatccgtttcatgttatgctttccaaattatgcttggtcgctctaaggtaaagagtaaataaaaaagctcctcattctcaataacaattttaaaacataaggcgggtttatgcactggatcactgactattggtgggttattttaattcttttagttggaataattattaatgccataaaagatatgaataaaatagatccaaaacagtttctaaaaaataaacggaaactgcctccccatcgcgattttaatgataaatgggatgatgaggacgattggcccaacaaaaatgaccagaagaagtagtcgttaaccaatgttggtaagcctgtgctaattgctcatctttttctgccatcagttgttggcattgccgacgtagtgtcgtgacaagggctttcttacccgataacgaaaattgttttacacaggcctctacagattgcttatcaataaaaaatgccactaataacgggtagcgtgatctatcaccttgcagaaaataaccaacactttgatataccgttaatatagagcgatgggcgaaagcaaaacctgccatcatcagccagtgatctgcttcactggcgctaggcaatgcagtagcaagagagatacctgtttgctgagtgatataatcactttgtaatgcgagtgcttgttgtgcaacttgtaataattgctgcccctgagcactgattgggtaaatagccatagtagtataacagccactactggcttctttatgaacgcctaatctcaccagataaaaaccacattgttgccaaaaattggctaatgcgtcggtatagccaaaactgacagaaaggtaatcaatattctgtttctggcactgcttagcaatatccgcaactaattttgcagcgactttttgacgtcgatatgctggcaataccgcaattcggctgatgcgtaatgaagttaaacacattgcctcaatggataagccgtaagtgactaacgattgggcaacaagattaccttttggtcgacgtatacctcgccaaacatcttgtgctaaggctttcgctagtcccccttcttcaatacaccacaccgccccaacaagatgccgatgaataaatgcagaccaataatgctgtttttgtccatcgaataaacgtcgaagatctaaaggtgtggttcgataatgagcactggttaaaagttgataaaaattggctcgttgttcactatcgaaatgctggcatgaggtgatcaccacctcgccagattggttagcatgatgaaaagaaggctcatcaagtaacaacagttgattcagccaattttcgagtggatcgtcctgcgcccagcgaataggtacggtgagttgataattttgtaactttggaatgctatcacccagttttaaaataaagccgcgccctgttccttcatagccttgtaccgtggtggtcattaacactcgagggaagtgctgacaaagagctatcagttgagcaatgggtatagtcgccgcttcatcaataattaaccaatctcgacacaaatgctctgtatcacaaagggctaacaaattatccggtgagtagaactcgatggttttatgtgtatgagataatagcacttcaatactgtttctcgcaggggcacaaaccgtcactgagccaggccattgctctatcaacattcctgctaacgctgattttcctctgcctcgtggtgccgtgatactccatacgccagattttgcctgtaaaagatgcgctaataactgtcgctgttgtatggttggcatcccttgaggcaacgcccactgttggcctgtattttttatttcaggtagaacaaggggctgcgatgcttgccaaataatggcctgtttatctgctagtgtaatttttgctaaccaagccataaaatggggagtagatataaccccttgcgcatcattccagcgctgactatcgttatcaatataatgttgccactgaacaatatcgggtaaacataagataagccaacttcctgctttcaacgttcccgttagcatcgctagtgcatcagcattaaaagcatggttagcgtcaaatacagcgtgaagatattcacggcctaatagttgatgagcatgttctggttttatcgcctcagacatctctgaagagagtattagccaatcgcctttacactgctgttggatagctcgaagttgttccctttgccatgtatagctccccgctaaaaggagtaatcgccgctggcctagtcgagcgaaggcttgttgatagcgcaataaatctaaagatggcactactatgacttacctatcaataacgaaaggatccccgcagcaatcagtggacctactggaacccctctaaatagagcgacaccaataacagttcctacgagtaaacccgctaccgttgacggttggttattcataagtgacaccccccgtgcccctaaccaagagacgatgataccaattgcaatcgctagtaatgatttccaatttaaaaaagaattgaaaacttcttgtgcggaaatgcggcctgtggcaatcggtgtcataacacctatggtgaggatcaagatcccaatggtcataccgtatttttcgactaatggaaaatattggtttaacggtgtgattttaataaccaataaaaagatcatcgctaaagtgacagtcatattatgactaataatgcccaggcctgcgagtaccagcaaaattagcaatgagggatcaacattactcatctatttttataatccttctctttctctgaatcattctaatatcatttaagcgtgagatgttattagttcaatgacgaagaagcaaatgtatcacaagatttaatatcgccactattgtagccgcgcataaaccatgtcttacgttgttctgcagtgccgtgagtaaagctatccggtacagcgtaaccctgttgttggcgttgcagcctatcatcaccgatagcttgtgcggttttaatggccgtcagtaagtccgcttcatcaacacggccttcaccggcaataaagcgcccccacatacccgcaaaacaatcagcttgcagttctagtcttactgataagcgatttgcttccacttttgaacgtgccatttgctgtttttcacgcatttgtgtggtgataccaagtagatgctgaacatgatgtcccacttcatgagaaatcacataaccttgagcaaactctccacccccaccaaggctgtttttcatttcattataaaaagagagatcgagataaattttttggtctgcaggacaataaaaaggccccatcattttagtgccggtaccgcattgcgttgtggtactgttggtatatagcactaatttaggatcacgatattgctcgccggctttggcaaacatcccttgccaaaaatcttccgtactggctaatacaacactgctaaaatctgccgcttcattataaagggcggattgttgttggctattttgtgttggttgtgatgtttgccctgtaagcgaattaaaatcaaaccccataaagcttgcgatcaccaaaataataatgatcacaaagccatattttgtacgtaataatagtgcaattaatcctaatgggagattaccaccaccggatgcagaagaaggctgccctcttctatcttcaacattattgcttcttcggcgatcattccaacgcataacccttccccattatgtaattcacttaattttaattgctaggtcattttgatgacaacttatcttagataataacaaaaattatctcatcgctattgcctattttttaagagcaaaataatagcacccattagtcactttcaattcatcttagttaatttttctttatagcatattaaaaaggtcagtttttaagctgacctttttcttttatggataatattgctgacgtaatcgattgcgcagttagtctaaagaaacaccaattcgacgtgcaacttcttcataggcttcaattaatccacctaaactttgacggaagcgatctttatccattttatctaaggtgtttttatcccataaacggctaccatctggtgagaattcatcccccagcacaactttaccgttaaagaggccaaactctaatttaaagtcaacgaggatcagaccggctttatcaaatagttcactgaggacatcgtttgctttataactaagacgtttcatttctgcgaggttttcttttgatacccaaccaaaagtttcacagtaagattcattaaccatcggatcatgacgggcatcgtcttttaagaagagatcaaaaataggtgggtttaagacagtaccttcttcaatacctaaacgtttaaccagtgatccagccgctcggttacgaataacacattcaacaggcaccatatcgagtttttttactagcacttcattatcagagagcaaacgttccatctgcgttgggatacccgcttcttccaatttgttcataatgaaataattgaacttattgttcaccattcctttacgatcaaactgttcaatacgttggccatctaacgctgatgtatcgtttctgaattcaagaataagataatcagaagactcagtggtataaaccgttttcgctttaccacgatacaactcagcttttttttgcatctgacacactccaaagatgtgataggtttaacaagaaacttgctttccatactctactctagattggataaaaaagcttttaaaacgtggaggggatcactaaaaaatatcactgtcgactattttttagcggctctaatcaataagagaaataagtgaattgagtgataaaaaggccgcacattttatgtacggcctgatatttaatagataaaaagagcttttattttattggcttactaaaggccgctttcattgcagcaaccatctgatcattttcagactgtgtaagaggtttacctttatcactgataaattgcaaactactgcggttatttaagtcaccgacttgtagtttgtaatccccttcattaattgtcggtttatcaacccctaacgtgctccaacttgcactacttaagcctttataagtcacttcaattgaacctttcgaacgagtacgatcgcccattttcatacccacgctttctagcgcgataggtaatctatcccacacaacatcaaatggtgctcgaacaataatgacaggcagtccggcattatcacttcccgtttgtacgtcgataataccttgcaaattactcgttgcgctattttcacttaagttacgcatgcggtttaaaccgtcaaccacttcatttaatagtaaggtgttataacgcttcacttccattggatcggaaatctcgttttcaccttggcgtaacccagtattcgtaatcgttaatatcacaacattacctgactggcttatcgctaaattatggcgactttggaaaggcacattttcatcagcacgagtccaagtgatccaatcggtaacaatctgtttttgtcctgcatcacttttagccagtgccacacctttatccgctaaaacagcagaaacttgctcgtataaggtggtattttcgggcgtgttgggtaataacagtcggctattatccgcattattctcactacgtgagccacttaataagtttaaagcctgtgttggtgggcgaatatctaatgctaaacccacaggttcactctttttaggcgtaggaatatcatattccccattttgcaaaggcaacaccatacccgctgggacaactaaattttttagcgctgctgactctaaatacgactcgtcaccactgacttgacgtttatagcgctgatcactggaacaggctgccaataaaaccaccagcgacagacccgcgactttcataatctttgatttatgcaatagtgttgccattaaaattccctaagttttacagtattcccgctgttaacagcgctttctctacgatatcctgacccgctgatgttaatggagtcatcggtaagcgcaatgtggcgtcttcaatcaatccaatacgttgacacgcccatttagctgggattgggttaggttcaacaaataactgatgatgtaagtccatcaggcgtcgattaagttcacgtgcttttgcaaactcacccgcttttgccaatcgacataattctaccatttctaacgcagcaacgttagcagtaaccgaaataacaccatgaccgccaagttgcataaagtctaatgaggatgcgtcatctccacttaataagataaaactatcatcattaactaactgttggatttgactaacacgacttaagttccctgtcgcctctttaattgccacaatattatccaactgagctaaacgtgcaactgttactggcaataaatcacatcctgtacggccgggcacattatacaagatttggggtaaagccgtgctttcagaaatcgctttaaaatgttgataaagcccttcttgggaaggtttattatagtatggagtaaccgttaagcaccctgcaatacctttattttcaaactgttgtgtaaaccaaatagcttcagaagttgcattagcccccgtgcctgcaatcacaggaatacgaccatcagccatatccagagtcattaatacgacatcaacatgctcatcatggcttaatgttgccgattctcccgttgttcccacagagacaatagcatctgtacccgctttaacatgataatcgaccaacttgcgtaaactaactcggtcaacattgcctttcgcatccataggggtgactaatgccaccatactgcctgtaaaatcaaaattgttacttaccataattcattgctccgagatagacttatacacaatggtactcattcattgctctattgaaaactacttaactctaggtttctaatgaaatttgctaatattctttgatttgaattaaagagagataataatgaaagatagtgcgcttctgatcttggcagaaatcaaattttgtgtttacctgttaggaataaactgaaagtcaaaaggaagcctattttgcctatacctgataaacattttctcgtactcactgcattagggactgaccgtcctggtatcgttgataccattacgcaattagttagccaatgcgggtgtaatatcgaagacagccggcttgcgatgttcggtcaagaatttacgtttatcatgctactttctggtggttggaatgcgattgcccaacttgaagcattactgccgataaaaagtgcagaacttgatttattgactgtgatgaaaagaaccaaaatgggtgcgccagtctcttacccatcaaccattactgcaaaagtagatatagaagatgcccccggcattgttgaacgttttaccaatttatttagtcaacatcactttaatcttgcagaattagtttctaaaacccatccttctgaggatggtactcctgctcgtttagaaattcagatcacggcccataatccgctagatgatcatggtctcgttattcatgagaaattcaatcaattatgtacagagttaaacgctcaaggcacaataagtatcgtaaatagtctgatgatgaaacaataaaagaatggagaattaggtaatgaacccattaaaagccggtgataaggcacctcaattcagtctgcctgatcaagatggagaaatcattaatctgtctgattttgctggccaacgtgtgctcgtttatttttatccaaaagcgatgacaccaggctgtacaacgcaagcttgtggcttacgtgatgagatggatacactaaaaaaagccaacgtcgaggtattgggaattagtactgataagtcagaaaaactttcccgttttgccgaaaaagagatgttaaacttcaccttactttctgatgaagatcataaagttgcagagcaatttggcatttggggtgaaaaacaatttatggggaaaacttacgatggtattcatcgtacgacgttcctaattgataaaaacggtgtgattgaacatgtgtttgataattttaaaaccagcaatcaccaccaagtggttatcgattatttagctgcacacccatagtttatgatcacagcttagtgctgataaataaaacagacagccattaactatcgctgtctgtttttttattatcaataagttgatgataaatcgcgtctatattactttttcttttctaatgtttctaaaggtggctcattggcaatttcatcaggcagcgcatgtaatactgctttgattaacgtcgctaaaggaatggcgaaaaacaccccccaaaagccccacataccaccaaatataatcacggataagataatgactaaggggtgcatattgacagcttcagagaataatatcggtactaataagttgctatctaaaccttgaaccactaagtaagcgataaatagcgcccaaaaatcagagcctaatccccattgagaaagtgcaattacaatgactggaatagtcgcgagtaccgcccccacataaggcactaaaaccgaaacgccaactaaaaccgctaataagactgaataacgcaaatcaaaaaaagcaaagacaaaataggtaaatacaccaacaatcaccatttcggtaaccttaccacgaatatagttggtgatttgctgattaacctcaatccacacttgtgctgcaagaattctatttttgggtaatacccgacggacagcattgagcatttgttgcttatcttttaataaaaagaacgtcattaatggcacaaggatcagataaatagagagcgtgataacaccgattaaagaggctaaagagacttttaacactgactctgccaccgttgaaaatttactgcgcaagttttccgccatcatatccacgatgccaacatccattaatgcggggaatcgttcaggtaattctcgagcaaatgcattgaatttattgatcatattagggatatctgaaattagcgtcatggcttgttgccataccgttggcgctaaaatcaaaataacaatggcactaatacctataaatagtgtcagaacgattgatacggcccaaattcgtgcacatcctaacttctcaagtaagtgtgttggccattccagcaaataagctaatacaatggcgactaataatggtgcaagtatgccactgaaaaagtagataattgaaaaaccggcaattaagatcaccaccagcgcgataacttggggatcagcaaatcgacgtttataccattgaacaagcaagtccagcatgaaaatagaggtcctttataataataagtcaaatatatctatatgtattgatttacataatcaataatcttttgacggattttacgttagcttttgctatgatacatcattaattataaatttttcgttaagatagctatcaggatgttgttgtatgaaactcagacttaaaaaaccactggtcgcgcttcttgtttctactttgctatcaacatcagtgttgcctgctcacgctgcgattgatattgaagataccctgcccgatatgggaacgacagcaggctcaacattgagtatcaatcaagaaatcgctatgggtgattactatactcgccaattaagaaatagtgcaccattagtttttgaccctctactttctaattacatcaataacttaggtcaaagattagtctctaatgccagttcggtaaaaaccccctttcacttttatttagtgaataaccccaatattaatgcctttgcttattttggtggcaatatcgtattgcactcagcactatttagatacagtcgcaatgaaagtgaattagcttctgttatcgcccacgaaatttctcacgttacccagcgtcatcttgcaagaatgttagaagatcagtctaaaaccacgccactggctatggctggaatattaggctctattttaatatttatggctaaccccaatgctggtttagccacctttacgggaagtatggcggggatgcaacaaaacatgatcaccttcacgcaaatgaacgaacaagaagctgatcggataggaatacaaactctttatcgtgcagggtttgatccacaaggtatgcctaattttatgcagatcttagcagaccaagtgcgctatagttctaagccgcctgaaatgctattaacgcaccccttacctgacagccgtttatctgatgcacgtagccgagcagcgcaatatgctccgcgcaaagtgccacaatcggctaattttctctatgctaaaatgcgggtattgaccatgctagagaaaaaccccgcatcaagtaacgccttgcaaaccacgctggatcagtttaggcaaggaacggaattagaaaaatcagccgccaattatgcacaagccttactctattctcgtgatcgtaaatttaatgacgcgagaaaaatactcgcccctatgctggcaaaagagccaaataatatctggcttattgatgccattaccgatattgacgtagagcaaaaccgtgctgcagaagcgataacacgtttacaacaagcgcttaagcaatcacctaataacaaagtactgacggttaatttagctaatgcttatatgcaaaataagcaatataacgaagctaatcgattattatatcgctatacctttgacaatcctgacgatcctattggttggcaattggtggcggaaaatgcggcaaaacaaggtaatcgagcccaagagcttgcagcttacgctgaagatttggcattacgaggagattttgaaactgccattcgttatcttggtgatgcgagtcgtcaagtaaaattaggcagtaatgagcaagctcgttttgatgcacgtattgatcaattgcgtaaacttcaacataaagacagtcaatttaaataagggataatatgaccaacaaagtaacgatttatcataatccgcgctgttctaaaagccgtgaaaccttacatttattagaagatatgcatatcacccctgacgttattcattatttagatacgccgccttctgttgatgagttaaaagcattactcaaagcgctagattttgacgatgcaagaaaattaatgcgcaccaaagaagaaatttataaaaccctaaagcttgctgatgagagctcacaagaagcattaattcaggccatgcataatcatcctaaattaattgaacgtcctattgtggtcgttggcaataaagcgcgtttaggtcgtccacctgagcaagttaccgccctttttaagtaggctaaattggcaattgccgacattgacggtatggcgcatcactaaaacgtaatctgagtgatttcagagcattgagacgagaaaccttacggctgttttcaaagatcggtgatgcgccctaataactcattatctgcagtgcgctcaaaatgacagaaaaccaacacgttatacctattaacttacttcactcctcttcatatcaataacacaattctctactgctttattaccacatcacaacggtgttaccgccatctgtatattctaaaggtcactaatgttaattttatattacaagcactaaggaaacacgatagttatttccattagtagaataaggtagtttattgcttgctttcaaaatatttcatcttaatttcattttttttatagtgaatattttaccaagatcaaaaatatctatcacgatcacattatcctgttacaaataacagccaacagaaaaaatttatgaaacgtttcatttgtattgtgacaaaagtctctttacacgagtgaattcctacttattatggtcttcagaaaatatgatggcagatttgatttgcgatacacttcgaaccatttttattttcgttatcatccaattcagaaattaatattagagatacaatttaaacaatactgcaacatagcaaaatacgttaattcgccacttcttttacacatgcctactcgctatctcactagagatagtgcgttatgttttttttaaaagtgtatagatatcggcaaactaactgaaaatatagccaacatatgggcgactaaaactaatcaatcatcaaaataccagatgattgccaggctaataggaaatttaatgaacatcgtacatagactcaaacttgtttcattcctccaattttttatttggggctcttggcttgttacgtttgcttcatatctatttgataaattacattttaaaggtactgacgttgggctaatttttagtgctttaggattagcatcactgatcgcaccggtgatcatgggatttattgcggacaagataaataaccgtaagctggtctttattaccctgcatattttatccgcgtttgctttagtactgatgtctcaaatgaccacagtgactaccctcttctttgcgacacttctgcatttattgttctttatgccaagcatttctatggcaaacagtattatttttgagttactagagcaaaaacacctagagccaaatgactatttccccaaaatccgtgtttatggcaccgtgggttttattgctgcaatgtgggttattagcttcttaggtttcggtaatagctacgatcaactgtttgttgctgcaatagcctctattatcttagcggtatttgcgatgtttttaccggcgacaaaagcgacagataaaacagaagcaaaagaagaagtggccgcttttagcttatcgaataccttacaagtgtttaaaaagaaaaatgtggttattttccttttctttgccacattgttaggttcagtattgcaaattaccaatacatttggggttccattcttacaagatatggccaaagcacctaatgctgatgactctttcttggctcattatccttctgttttcttatccatttctcaaatttctgaagtggtctttattctatttttacccctgttattaaaacgagtgagaatagaaactatcgtattatttagtatgattgcatggatcttacgttttggtttcttcgcttacggtgactattcatcattaggccaaatcgttctgttgttatccatgattgtctatggttgtgctttcgatttctttaatatctccggctcgctattcctagaaaaagagatcccattacaatatcgctctaccgcacaaggtatgtttatgaccttagtgaatggttttggtacttatttaggtgcgatgctaagtggctgggttattgatttgtataccacagatggtgttattgattggcagtcattctggttgatctttacgggttacactgtggctatcaccgcactttatctgatttacttagtggttccgcagaagaaaacaaaagttgtagaagcacattaattatttcccccattctttatttgttgcactcaccgcttatctttcgagataagcggttttttattactggttatctattgcataatgcgttgttttaaatagattgcgattaaagcttaagaatatcttttacgaaaggaatggtcagcttacgttgagccacaatagaggcgtgatcgagttcatctagcatttcaaataatgtgcgcatttttctatctaagcgctttaatacaaaacgacccacatcttcgggtaattcaaatccacgtagtttcgctcttaattgtagtgcttgaattttttcttcatcgcttagcggttgtaagcgataaatttgcccccaatctaggcgagaagcgagatcaggaagttgtaaatcaatttgacggggaggtctatcccctgtgattaatagacaggtgcgaccaagttctaatacgcgattatacagattaaacagagcaagttcccactcttcatcacccgcaatacattgaacgttatcgatacaaactaatgaaagatgctccataccttcaagcacatctggtacgaaataagcccgtttatcaagaggaacataaccaactgcatctccggctaaagaaagctctgcacaagctgcatgcaacaagtggctttttccgcccccatcacgagaccagaaatagatataactgccatgtgattggtgaatagcagtttggatcgctgcaacgagtgatgcattttcccctgcgtaaaagctatcgaatgtctcatcatcgggcagagatagtggtaatgatagctgtgatggcgtattcagaagcacctcacctgaatagtttaataaacgtcgtgattctaacacaaattctatcaatgacagaatcaatattaaaaaagcaagacgagctgcttaagatgacagcaataaatagcgaaactgtttattttgacatcaatataagatcagtttagccattctatttcactatttaaacgttatcttagagagatcgtgacctgagggttgctggtaaatatctaatttaaaatacttagcacaagcatttatatactcaaaaatttctgattgtgtctcttcatattccacccatgtggtagcacgagtaaaacaatataattcaacgggtagtcccattggtgtggggggcattgttcttatcaccaaatacatatccggcctaacatcaccacgcattttgatccaatttaacatatactttctaaaaagttgtagattggtcactccgttggtttctaaccaagtattaatatcacctatctcttcttctttaccttctaacatcgcttcaatgctttttttaagtggcgcagtattttttagctcctgcactaactgttctgtagcaaatgaaatagaggattgatcaatatagaaactacgcttgatacgacggcctcctgaagagaacatcggttgccagttagtgtatttttcggttaaaaagtcctttgtgggtatacgagaaatcgtgttatcccaattacgtactgtaattgtgtgcagtgcgatatcaatcacttcaccactaatattactgctgggtaattcaatccaatcatatagttttaacactttaccatttgagatcagaatattagcgacgaatgagataagggtatgttggaaaacaaacatcaataccgcagcgatcgcaccaaagctggaaataataatcagtggggattgttcagtaaatagcgcgataataagaataaaggcgatgatccacaccactatcttagcaatttcaatataacctttaatcgaattgttacggtgccacgattttttagcatgcctgatattgaaaatatctaacgcgttattaagaagagaagcaatattgatgacgataaaagcacgacaaaccgtttcaaagataatattcatctgtgctgaaaaagaaggcaataactggtttatatagagaaccagagtgactgcaacaatagaggcactttttttcgcaatatcttctatcgtctcttcatctgagagttcggtgaataaaaacaatagacgcttggctatacgacgaaagatcatctttgccagaaaccacaccaccagcaacgtgatcactaaaaacagcgtggtgaaaatctgcttagatacgataaagtcgtatatatcaacaagtttttccataactagcgtcgtcacccttttaaaagctttgttacaaccttaaaacaacttttagctcaataatagctaaaaagtatcgctatcactaaaccactaacaatctcattgtctcatttatttgcgttaaataaatattattattaagtttattttctttttctaagttttaaacgctttttataacaaaagagttcttgtttatcttataagaataaaaaaataaccaataaaaaaagcagtctatgactgctttttagttcaatgacgaaatattagcgaaaaaagctcatcaatgattacttggtgtttgtatgttcgttaattgactccagagtatcatccactaactcagtttctgggcgaataatactcaccagcttaaacactaaacttaaaacaataccgactatcgttgctaaggccatgccttttagttcagctgcgccaatttgaattgatgcaccacttacaccgacaattaaaatgatcgctgttaatatcaagttttgtggtttgttataatcaactttcgaatctaataatacgcgaataccggacgcccctattacaccatacagtaataaagagacaccgcccattaccggtacgggaaccgctgcaatcgcggctgccaatttaccaacacaagaaagtaagatagcgataattgctgcaccaccaatgacccaagtgctatacactttagtaatagccataacaccgatattttcaccgtaagtcgtgttaggtgtagagccaaaaaatccggagataatggttgaaaaaccatttgcaaacatagagcgatgtaagcctgggtttttcatgagatcacgttgaacaatattcgcggttaccacaaggtgccctacgtgttcggcaataaccactaatgccgccggcaagataataaaaatagcactccactcaaaacgcggcgaataaaaggtaggcagagcaaaccaattggcttctttaatcggtgtcacatcaaccacgcccataaagaaagagagtgcgtaaccggctaacacgccaataagaataggaataatagccaaaaatcccctaaacatcactgagcctaaaatagtcacacccagtgtcaccatagagattatcaatgtttggctatcaacgggattatctgcgctaggtaataatccagccatattagcggcggttccggccaactcaagacctattacggcaacgattgcgcccattgccgcaggaggaaacatcacattaatccatcctcgtccggcgattttcacaatgccagcaacaaggcaaaatagcaccccacagacaataaacccgcccaatgctaattcatagcctaaaggaagtagcaataacaccggagagataaaggcgaaacttgaacctaaataagcaggaatacgacctttacagataaagagataaagcagagtaccgataccgttaaacaataatatggtggccggattaaccttaaacaaaatcggcacaagtacagtagcaccaaacatggcaaacagatgttgaaaactcaatgggattgtttgtaataatggtgggcgctcttctaccccgattgcacgacgagtcatgcttacgacctctctttaaaatagatataaatggaatttaaatttcagcgataaaacaaaccaataagtgatccaaaaaaaagccgactatcaaagtcggcttaatcattattttgtaccaaatatcttatcacccgcatcaccaaggcctgggacaatgtacccatgctcattaagatgcttatcaatcgatgcagtatataactcaacatcaggatgagcttcttctaatgctttgatcccctcaggcgcagccactaacactaaaactttaattgaagtacagcctgaattttttaataaatcaattgtggcaatcatagagccaccagttgctaacattgggtcaacaacaagtgccatacgttcttcaatatgagaggctagtttctggaagtaagggacgggctttaaggtttcttcatcgcggtaaacaccaactacactgatccgggcactaggaatattttctaatactccatccatcatcccaagaccggcacggaggataggtacaacagtaattttttttcctttaatctgttctatctcaaccgggccacaccaaccttcaattgttaccgtctctgtttctaaatcggcggtagcttcatacgtcagtagactggaaacttctgaagccaattcacgaaagcgtttagtgcttatatcatgatctcgcatcagccccaatttatgttgaatgagtgggtgttttacctcaacgatcttcataatttctcctaatgtacgacgcagccagacaaaaaaatcgcgagattataccgcttttttagtgactttccatcgtttttctattgatattgatcaatcgcacagcttttaaccacactaacatgaataattgtgatctaaaaagaagatcctcgcaaacgtttgctttgcctgttagaatagccaccgcacacattttttcttaacagcaacttgccgtgagggctagacgtgactaacaaatcctctctcagctataaagatgccggtgtcgatattgatgcaggtaatgctttagtcgatcgtattaaaagtgtagtaaaagaaactcgccgtcctgaagttatggggggtttaggtggttttggtgcattatgcgctattcccactaaataccgcgaacctattttagtgtcaggcactgacggtgtcggtactaaacttcgccttgcgatggacttaaatcgccacgatgatattggtatcgatttagtcgcaatgtgtgttaacgatttaatcgttcaaggtgctgagcctctcttctttcttgactactatgccacaggcaagttagatgtcgatactgccgcacgggttgtaacgggtatcgctgaaggttgtaagcaatccggctgtgccttagtgggtggcgaaacagcggaaatgcccggcatgtatcatggtaacgattatgatatcgccggtttttgtgttggtgtcgttgaaaaatcacagattatcgatggtagcaaagttaaagcgggtgatgcattaattgctctcgcttcaagtggccctcattctaatggctattcactgatcagaaaaattcttgaagtcagtggtgcctgtgctgaaactaccccattaggtgatacatcactggctgataaactcttagcgccaacccgtatttatgtaaaatcactcctgtcattaattgaaaacgttgatattcacgcagtggcacatattactggcggtggattttgggaaaatattccgcgcgtgctacctgaaaatacgcaagctcgtattaatagccaaagttggcaatggcctgaggtctttaactggctacaacaggcaggtaatgtcagcactcatgaaatgtatcgtacctttaactgtggtgtcggcttattaatcgccgtgagccaagctgatgttgaaaaaacgctatcacatcttaatgcctgtggtgaaaaggcatggttaattggtgatattgccccgcaagcagcgggtgatgcacaagtgattatcaattagtaaaagtacccccatgaaaaatattgtggttctgatctcaggaaatggtagcaacctacaggcgattattgacgcctgtagggcgcataaaatcgcaggccaagttgtggctgttttcagcaataaagcacaagcttatgggcttgaacgagcgagacaagcggatatccctgcttactttatcgatccggctgattatcctgatagagaagcttatgataaagcgttaatcactcaaattgatggctatcagcctgatattgtggttcttgctggctttatgcgtattttatcgccgttatttgtcaaccattatcagcataagctattaaatattcatccctctttacttcccaaatatcccggtctgcatacacataaacaagttattgagaataaagatacttttcatggtactaccgtacactttgtcacggaagaattagacggtggcccgatgatcattcaagcgcgtattcccgtctctcctgatgataccgaacaaagtttgcaagcaaaaatacaaacacaagagtatcgcatttatcctctcgcaattagttggttagcagaagagagattaaaaatgatagataatcgggcgctacttgatggtaatgttctgtttgacaatcttgattaacggtttcacttaagataaaaagtcactttgtgctacactgtagcccgcggtgacttttattgtgtcacccttttctctttttattcaatgcattttcaccgaggtgcttatgtccggtggtaagaaagttccacctataaaattacgtcctctcgaaagagaagaccttccttttgtccataaacttgataataatgctagcgttatgcgctactggtttgaagagccttatgaagcatttattgagttaagcgacctatatgaaaaacatattcacgaccaaagtgaacgacgttttattgctgaaagtgaaggcacaaaagtcggtttagttgagctggttgaaattgattatgttcatcgtcgtgctgagtttcaaatcattatcgcccctgctcatcaaggccatggttatgcagcccgcgcggcaaagttagcgatggactacgctttttctgtacttaatttatacaaactctatttaatcgtcgataaagagaatgctaaagcgattcatatttatgaaaagcttggctttaagaaagaaggtgatttaatagatgagttttttgttaatggctcttaccgttctgcgattagaatgtgtacattccaagccccttattttgaacaaaaagccaaagcagcaagaccggaaaattttgttaaaccgggtgcaacgataaaacaatatgtctgattaattcagataataagatttaactttaacccatgttggagttcagatgtcccaagaacgactctatattgataaagagatcagctggcttgcgtttaacgagcgagtattgcaagaggcggcagataaacgtaacccgctaatcgaaagggtcaggtttttggggatctattcaaataatcttgatgagttttataaagttcgctttgcggatgtaaaacggcgtattttaattaatgaggagcgcggctcacgctctggctctagtcacgctcgtcatttaatcaaaaaaatccaatctaaagttgccaaagccgaccaagaattcgacgcactgtataacgacttgcttttagaaatggcgcgtaatcagatttttttaatcaatgaacggcaaatttcacctaatcaacaaatttggttacgccaatattttcgccaaaacttaagaaaacatatcacgccgatccttatcaaccctgaaactaatttggttgagtttttaaaagatgactacacatatttagccgttgaaattgctcaggggcaaactattcactacgctttgttagagatcccctctgataaagtccctcgttttgttattctgcctacagaacaaggccgaggtaagaaaaagtcaatgattttgctggataatatcttacgctattgtcttgatgagatttttaaaggcttctttgactatgattctttaaatgcttattccatgaaaatgacacgtgatgctgaatatgatttagccactgaaatggaatccagcttattagaaatgatgtcatctaccttaaaacagcgccttaccgctgagcctgttcgttttgtctatcaacgtgatatgcccgatgaaatggttgctttactgcgtagcaaattaggtttatctaataatgactcggtcattgctggtgggcgttatcacaactttaaagactttattaattttcctaatgagggaagtaagtttctattaaataaacctattcctcgtttacggcatgtttggtttgataatttccgtaatggctttgatgcaattcgtgaacgtgatgtgttactttattatccttatcatacctttgagcatgtattggaattattacgccaagcgtcttttgatcccagtgtcatttcaataaaaatcaatatctatcgcgtagcaaaagactctcggattatcgattcgatgatccacgccgcccacaatggtaagcgtgtcactgtggtcgttgaattacaagctcgctttgatgaagccgcgaatatacattgggctaaacgcttaaccgaagctggcgtccacgttatcttttcagcgcccggcttaaaaattcatgcgaaattatttattatttctcgtttagaagaaggcgaaatcattcgctatgcgcatattggtactgggaattttaatgaaaaaaccgcacgcctttataccgattattctctgttaaccgcgaatacagaaattaataatgaagtacgtcgagtgttcaattttattgaaaacccttatcgtccggtgacttttgaacatttaatggtatcaccgcaaaactcacgtattttgttaaaccagttgatcacaaatgaaattcacaatgctcaagcggggcaccctgcgggtattaccttaaaagttaacaatttagtcgatgaagagttagttaatcgtctttatgatgcctcacaagcaggtgttaaaatccgcctattagtacgcggtatgtgctctttagtccctaatcagcccgattttagtgaaaatattcaggtcaccagtattgttgaccgctttttagagcatgatcgtgtttatgtctttaccaataaaggggatgagaaaattttcctatcatccgcagactggatgactcgtaaccttgattatcgtattgaagttgccgtaccactactcgaccctcagctaaaacagcgtattttggatattcttgagatccagtttaatgatactgtaaaagcacgatatttagataaagatctaacaaatagctatgttcctcgaggaaataaacgtaagatccgcgcccaacttgctgtatatgaataccttaaatcattagaacaaccaggatcacgagcgtaatcaatgcctttattacaagatgactcttcttcaccacgtcctttagaaattgcggctatagaccttggttctaatagttttcatatgatcatagcccgtgttgtcaatggtgccttacaggtattaagtcgtttaaaacaacgggtatatcttgccgatggtcttgatgataatgataaactcagtgaagaagcaatgttgcgggggctttctgcactttccctttttgctgaaaggttacagggatttccagcagaaaatgtcactgtggtcggtacacatacgttacgggttgctagcaatgccaaagtctttttgcaacgcgcaaaagaggtgatgccctatcctattgaaattatttctggtcacgaagaagcacgcctgatctttatgggcgttgagcatacgcaatctgaaaaagggcgtaagctagtgattgatattggtggaggctctaccgaattagtgatcggagaaaattttgaacccatcttgatcgaaagccagcgtatggggtgtgtcagctttagccgtcaatttttcccgaaccaaaaaattagcgaatccgcttttcgtaaagcacgcgaaaaagcagcacgtaaaatggaaaaaattgcttggcaatataaaatgaccggctgggatgtcgcattaggcgcatcgggtactatcaaagctgcacatgaaattttggttgaatttggtgaaaaagatggtgttatcacccctgaacgcctattaatgttgaccaaacaggtactacggtttaaaaaatttaaagatatcaccctaccggggttatccgatgagcgtaaacacagttttgtacctggtttagccattttatgcggtattttcgacactttaggcttaaaggcactccatttatctgatggtgcattacgtgaaggtgtattgtatgaaatggaaggccgttttcgtcatcaagatattcgccagcgtaccgccaaaagccttgctgaacactataatatcgatcgtgaacaagctaagcgcgtcctcaccacaatgcaatcactgtatgctcagtgggcggaacaaaatcctaaactggttcgtcctgatctagaagcgattttagtatgggcggtgatgttgcatgaagtgggattaagtatcaatttaagtggtttgcatcgtcattctgcttatattctttcgaatacagatttacccggttttaatcaagaacaacaacaattattaactacattagttcgttatcatcgcaaagcaattaagtttgatgagttacctaaatttaatctatataaaaagaaacagtattatccattagtacaaatacttaggttagcaacactacttaataatcagcgtcaatcaaccactaaaccggtttctttacgtttagtgaccgatgataatcactggacactctattttcctaaaaattatcttgccgataacacattgatggaattggatttagaaaaagaacaggagcattggcaggccgttccgggctggaaactggatataaaagaggaatctgcttaacaatatgatattatacagaaaaagacgcggtataatgcgtcttttgttgcatttatcatacaacaactatcacataacaacgtaaggtttgatttgtgacgataatatgaaaatacccaatgtaatattttcaagatcgctatttttttatatggagaagaccgataatcatcctaaaatggaataatgaatactaatggttatctccctcgtaagaattaaaaaggaataacatgtctcaatcagctatcaataatgatactgcggctgccatcaatccatattcacaaaaagtggcacacctgcgtcagcaaattctgaacatctttcttgaagatgaccgttttgttgaaacagtgttaggtgaagcaagtgaaagtgataggctgagccaccatgaacttcatgaaaaaatcaccactgttagagaattactacaagatctacacgcggcagatattgcagatattcttgaagcccttccctatgatgaacgtttagccctatggcatttggttgataataatgagcgtggtgcggttttagtcgaagcctctgtcgccgtttgggacagcctaattaaagatatgacggatcgtgaattattacgctcagtcgcttctttgcatgtggatgaacaggcctatattgcggagcatttaccccgtgataccatgcgtcgtcttttgacctatttagaaccaagtctgcgtaataggatcagagaagtcctgcaatatccgaaggatagtgttggacagatgatggattttgagtttgtcaccgtgcgtggcaacgtaacattaaaaacggttcaacgttatttacgccaacgtggctctattcctgaagctacggataaaattttcgttattgataatgccaatcatctgttaggtgaattacccttaaccacagtattaacccagtcgccggataaacgggtctctgatgtcatgaaaaccgatactgtcagctttatgcccgaagagaaaggcgaagatgcagcgggtgcattcgaacgttatgacttaatttcggctgcagttgttgatagtaatggcctgttaatgggacgtttaaccgttgaagatatcgtcgataatatgcatgaagagagcgataccaacattcgtcgtatgggggggttaagcccagaagaggatgtattcgcccctgtcgggcaagcggttaaaacacgttggacatggcttgctatcaacttatgtactgcttttgtcgcttctcgtgttatcggtgtgtttgagcataccatttcccaattagtcgccttagcaactttaatgcccattgttgcaggtattgggggaaataccggtaaccaaaccattactatgattgtgcgtgcattagcactacatcaaattcagactggtagtttctcgttcttaattttaagagagttaggtgttgcccttatcaacggtattgtttgggggggaataatgggagttgtaacttacttcctttatggtgatgttgcgatgggcgccgtaatgacaatggccatggtactcaacctattaatggctgccttgatgggagtattaataccgatgaccatgataaaactgggtaaagatccggccattggctcaagtgtgatgatcaccgcgatcaccgataccggtggcttctttattttcttaggcctagccactattttcttagtttaacaagacagataaaaacgccactgtagagtacatcacagtggcgtttttgtttttatagattttttaggctgttgttgaaagaaagtaatagaccagtagtaatgcgacaacaagcgataccataaacgttcttcttaccgcaacactgactgataaattatcttgttgcagactcccatacagcgttttttttagtagcagactactagctaaagcgacaacaaacacagatgcaaatagcacaatcgcggctaacaacaccgcacttatcgaaattgaattcatcattcccccctgctatatccaccgacatctgatgtaattataaccagataatgacgctttgagatgatttttgctgtttttccctatttatcatttaactatttaaaatctatattttaaataaaaatgcgtaaccatgcttaaatcaaccaattttattgacatttaatattaataattttcaattttaagaaatttaaaaccaatgaataaatgagtttattttagatgaataccctaaaaataatgccaataacaggttatattgctacaaaacaccaatatttattaattaataatctaattattatttaattaacaagaaataataaattaaaataacgctaattttattatttaattcaatttagaaaaattgaaatgatattcaataaatagtttttttaaccataactaataaatgaaaataaaggtaagaacaaaacctctaattttattaaaaaactacacaagaaaacaaaaaccgccctaaaaatcacaaaacaaacaaaacttagcattaaaaactacagatgctcacaatgacaacttatcaaattgttttattttatgctctttacttcataaagagcttcctgatataactatttacatcattacaatattattctttcttgtataaaagacgataaataactttttaacgttatttattgccacctttgtgatcaacttttttaagaattttattgatggtttagttatttactcttttttatcacgatgattaatataggttgttattatgacatcacaatcacactccactcagccgttgagtcaacctacggcaagacctttaaaccgcaacgactataaaacgttgggtttatcctcactaggaggaacattggagttctatgatttcgtgatcttcgtgttctttacgaaaacattgagccatttattctttcctggtgataacgcttttatcgctcagatgcagacattaggtatttttgctgccggttatcttgctcgtcctttaggtggcatcattatggctcactatggcgatattatcggccgtaaacgtatgtttaccttaagtatctttttaatggctgtacctactttggtgattggcttattacctacctatgccagcatcggtgtggctgcaccgttattactgttattgatgcgtattatgcaaggggcggctatcggtggtgaaatgcccggggcttgggtatttattgccgaacacacaccgaaacagcgttatggcttaggggtgggtaccttaacatccggtattactggtggcatcttattaggctctatcgtcgctattattgtacaacgcagctatagcgctcaagaagtgaatgattttgcatggcgaattccctttattttaggtggtatatttggcttgatctcggtttatttacgtcgttttttacaagaaacacctatctttaaagagatggcggctaaaaaagccttagcacaagaaatgccggtggtttcggttatcaaaaaccataaacaagcctgtttaattactgcagcattaacatggtctttatctacagctattgttgttactattttgatgacacccagtgtcattgttgaagggatctacaaaatagacagaacaacatcgttagaagctaactgtgttgccaccttaacgctgaccttaggatgtatcttctggggctggttgggggataaattaggaacccgtgcatccatgaccttatcatggggtggattaattgttactgcattccatttttatggaagcttagatgccaatatgtctggtatccaattagcatttaactatggtttgatgggcttttttgtcggtgcaattgccacaacgccaattgtgagtactagagcatttcctccttcaattcgtttttctggtctctcttttgcttataatatggcctatgccgtatttggtggcttaacgccaatgttaacgggcgcttggttggaaaaaacggcaatggcaggagcttattatgttgcagctgtttctgcattagccattgttatcgcattcttgcctttagcttataaaggctggatcgcggtaaacgccagctcacgggaaaaagagatagcgttgcaagttgataaagtcgctagttaatcgttgctagcaagaaatattttactctccttagaatttattattcacaacaacaccaccctaataggtggtgttgttgcatcaatataattaatctaatcactgtagtttatctgaatttaatcttgttatatatcaatcaattgataatacacaatttgctctttaccctgttaaagaatatttttatatcgcagggagtgcttaaagctaaatggttaacaaaaaaaatttgcataaagaattggcacaattagaagccgaaggtcatatcccctataaaatccaagaggaaaaccagcaaaaaagatggcaatggaaacattacacgtcaggagtgcactattttgcacctacagatccattagaaatgggtcgctacaatgatccaacaggcataacgggaatatgctataccgctgattatgcagttgtagctattgctgaatcattaggacgtcactatcaacataataaagcttttattttaggtcttagtgatctaaaaaaagctcagatatacacacttgcaactacacgtaaaacaaaacttattgatataccaaagttacagggcatattgcatatcactgcagaccaagtcatggggaaaagttatgacattactcagaatattgttgattgggcagccaataccccagggcttgattatgatggtataacctactcttcaaggcattactatggaatgtgtacagccttttggtgtagaaaacatattatccctcctcttgttgatatttctcactgctcccttgatttatacacagattgtaaaaaagaaaattttccgcaaaattggccctatcaagacattacaggacttgagatcattactgaaacattacattttaagatcaacgataatgagtagatttttattagtttgaaatatgttttccaaaaagtttagcttgatgaataatttcttgcatttgttcactcatgcgtccatattttttaagcgcatcaataacattaatatcttgttcatcctcaaaaaaatacatactcgttaaaaatgatacttttgttgttgagcttaaaccatccaataaaattaagatctcatctaatccatccactaatcgattaccatcaaattgaaaaataggtaatcgatattctcctcccattttaaccgctaatagtttattagcctttaaccgattattaatcgtttgacgttttactcccaaaatagctgcagcttggctagctctacatgtgcctccaagctcttttagccgttcagaaaacttaatagcaccttcgtttaaacgggctattttacgttgttctcttggtgaaattgcagacgaacgtatcagttgagtttcaaaaattaactgagccaattcgttatcactcatttttaaagcacttgctaaacttttcttctctgctaattcattaaccaattcttttgtaagaacagtcattctttctagaacagccactctctctaccgataattgttgtgatgttcgtttttgtattacgctgttcatacccacctcttttttacattttattcattatatagtgagtaaagtgtataaaacaagtataaataaaaaacaacattatcaagtactatagatattttttgttaaaattaactttatttttaaatagatataaaaaaggatgccctaaggcatccttttattgtctgacaataaatttcacatattactgtgtcattttactcagcataggggcagtaaatagcattaacagtgcaataacacctgttacgatacctatttgtaaaaatacactgctataaatttctaatgatgcgtgtgcattttgtacgtcttcaggaacggccattaagcttgccactttaccagcaataattgcagctgccgcagatgttaagaaccatgcgcccataataaagcccattaaacgctgtggcactagttgggccaccatcgcaagacctaatcctgagatcataagctcaccaatactttgaaagccataactggcaacaagccaccatgatgaaacgatgccagcttcatttgccatactcgcccccaatggtaatactaagaatgcagttgcactcaaaaacattcccactgtgaatttataaggcatgggtaatttatcacccataaagttatatatagcagccaataatggactagctagcatgatccaaaatgggttaagtgattgaaattgctctggctcaacactaaagcctaaaatagcgtgttcaacattatggattgcaaaaaagtttaatgatgttggcatttgatcataaagaacaaaaaataccacggcttccaccatcagtaagaaagcgacgatcattttacgccgtgcaacccctttcatcataaaagtttcacgggcaaaaatcaggataatacctaatgaaataatcgctaaagaccatgttgccacttcattattatgtaataaccacgttgatactgccgttaaagcaacaatccccaccagcgttaataacagtttcaggtagtttagtggctcaaagtcaggcctagagcctttatctttgatccaaccgcgacatagcataaagtttgccagtgtgatcaacatccccaccacacttaatgcgaaagcgacatcccaaccataattcgccgctaaccatggtgtcgctaacatggataaaaatgatcccacattaatcgacatatagtacatggtaaatgcaccatctaattgtggatcatctttctcataacaggtggctaataaagaggaaggattggctttaaataaaccattacccaccgcaatagtggctaatccccagtaaatcatatctttatcatgatcggagaaagcaaccatggcataaccaattgccagcacaatagcccctaggacaataaccctttttgtcccgagaattttatcgccaagccagccaccaattgccacaaagccataaactaatgcggtaaatgcggcaaaaacagtgatagcttccgcctcactcatacccagcattttaaccagataaacggccatgatcccttgtaagccgtaatatccaaaacgttcccataattcgattgagaagatgagataaaatgcacgaggctgtttaaacgcattcagactcggtttctgttcatcttcaggtgtgtttgcagttgacactaaaaacctctagttattctattatgcccttatttttgggctgcttttaccaaaaacattgtgattcaagacagagttaaagcgcggtgttattcatactgaattgttattcttaacaaagagttcaacacagagaaaaacaaggttggcattctatcaccggaaagaataattatctaagaattataactaactattgcgttttatcatagttgacgccatttgtacaaaatagttatgcgttcaaaaaatcaacaaacaaaataactcactgattattaatcatttattttatgctggtttattcatcatcatcactatataaaaataaagtgcgccgagatagctagctagaaatcgttttttctctttataaaaagatataaccccagcatattattgctaagtgacaacaactgattagaatataatcaataaacacattccttgactcaattttcatatttcctccatttttacccctaaagaaataggtagaatgtcataattgattgtgtcatttcattttttctcaattagcgagttgtcagtaggatcaccaacgcaatgaataacaacaaaaagaccaaaaaaagattttctcttattatcatcctgcttattgttatcgctggcgctatcgcctattggcaatactcttcaaacaacagcgcacctcctgtgagtaaagatacccctactgcgaatacaccaaatagaagtacagctggctcaagacgaccaccgatgcctcctgtacaagtggcgacatctgcacaagaagatgtgccgcaatttttaactgctttaggtacagtgaaagccgtcaatagtgtgaccgtgacaagccgtgtggaagggcaattaatggcgttgcatttcaccgaaggccaacaagtgaatcaaggcgatttgttagcagaaatcgacccacgtccttttgaagtgcaattagcgcaagctaaagggcaattggcaaaagatcaggccacactggcaaatgcgcgccttgatttagctcgctaccaaaaactggcaaagacccatttggtttcacaacaagaattagacaaccaagcggctttagtcaaacagtctgaagccagtattagtatcgataaagcagcaattaataatgcacaattacaattaacctatagcaaaataacggcccctatttcaggacgggttggattaaagcaggttgatgtcggtaactatatttctggtggctcatctacgccaattgtcgttattaatcagatggatcctgttgatgtgctctttacattaccagagcaagatctatcacaggttatcttagcccgtaaaaataaccctacattaccggttattgcattagacagaaataataaaattgaattagcacaaggggcactatttagtgttgataatcaaattgatgccactacagggactatcaaattaaaagcccgttttcctcaacaagaaagtacgctatttcccaatcaatttgtcaatattcgtttatatgtcactacattagaaaaagcggtagtgatccccaatgcagcattacaaatgggaaatgaaggacactttgtttgggttgttgatgaggaaaacaaagtcagcaaactcgctgttgaggttgcatcacaaaatgcagataaagttgtcattgcctcagggttatccgctaatcaacgtgttgtcaccgatggtgtggatagattaacgcaaggtgccaaagtcgagattgtaacaccgctggcacctaaagctaaaaccactgatcccgttgttgcggagaaagcataatgagcgaaaaaatccccgctacaggtggtgggccatctcgtttatttattttacgtccagtggcaacaacgctgtttatggtcgcgattttattagcaggaattgtcggttatcgtatgctgccagtgtcggcattacctgaagttgattatccgaccattcaagtcgtcacactctatcctggggcaaaccccgaggtgatgacctctgcggtaacagcaccgttagagcgtcaatttggacagatgtcaggcttaaaacagatgtcctcacaaagttcaggtggggcatcagtcattacactgatgttccaactcacattaccgttagatgtcgcagagcaagaagtacaagcggccattaatgcagcaactaacttattacctactgatttaccttatccgcccatttacagcaaagtaaatccggctgatccgccagtgctaaccttagccgtcaccagttctgtattgccgatgacacagctacaggatatggtagaaacgcgaatatcgcagaaaatatcgcaagttaacggcgttggtttagtctctttagccggcggacaacgccctgctgtgcgcgtaaaattgaatgcccaagctgccgcctcttatgggttagatagtgaaacaatccgcgtggctattaataatgccaatgttaactctgccaaaggtagccttgatggccccactcgctcggtaacattatccgccaacgatcaaatgaaatcattagatgattatcgcaaactgattgttagctataaaaatggcgcccccatccgccttgccgatattgccaccattgaacaagccccagaaaataaccagcttggtgcttgggccaataatcaacaagccattattatcaatgtgcaacgccaaccgggtgttaatgttattgaaacaacggataatattcgtaatttattaccggatttagtgtctaatttgcctaagtcggtaaatgttgagatcttaaccgatagaaccacgactattcgggcatcagtgaaagatgtccagtttgaactgggcttggcgattgcacttgtggtcatggttatctatctatttttacgtaatggtgttgccactcttattcctagcattgccgtccccctctccttagtgggtacttttgcggtgatgtatttttgcggtttttctgtcaataacctcaccttaatggcacttaccattgcgacaggctttgtggttgatgacgccattgtggtgatagaaaatatctcccgttatctagagcgaggagataagccgttaaccgcagccttaaaaggggcgggagaaatcggctttactattatctcactgactttttctttaattgccgtactgatccctctgttatttatgggagatattgttggtcgtttatttagagagtttgccattaccttagccgtggcgattttaatttccgcggtagtctctttaaccttaacgccgatgatgtgcgcacgcttacttaaaccagaaagtcaaattaagcacaatcgttttgaaatggcttgtgagcgcttttttgaaaagatgatcgccgtgtatgcggtttggttaaaacgtgtattaaatcatcaatggataacattaggtgttgccctcagtacattagcattaacagttttgctctatctatttatccctaaaggctttttccctttacaagataatgggttactacaaggtacaatagaaacctcacaatccatttcttatcaagcgatggttgaaaaacagcaacaagtggttgagaaactgattgacgatccggctgttgaaaatattgcgagctttgtgggtatcgatggcagtaatgccaccctcaatacaggtcgcttgcaaattaccttaaaacccctcgatcaacgtgattcacgtattgatgaaattattcctcgtttacaagcacgagtcgcgtctattgcaggaattacactctatttacaacccacacaagacttaactattgatacacaagtttcccgtactcaatatcaatttaccttgcaagcaacctcgctcgatgagcttgcctattgggtgcctaaattatcacaggcactacaagagagtccggaacttaccgacatcagcagtgattggcaagctgatgggatgatggcctatatcaatgtagatagagattcagccagtcgcttagggatctcaatgagtgccattgataatgcgctgtataatgcctttggacagcgacttatttcaacgatttacacccaagcaaatcagtatcgtgttgtcttagaacagaatatgcacaatagtgaaggactacaggcactttctgcagttcatttaaccggcaaagagggtgctatggtgccactcttatctattgcctctgtggagcaacgtctcgcgcctttatctatcaatcaccaagagcaatttcctgctaccacattctcatttaatgtcgcgaaagacgcatctcttgaagctgctgttaatgccgttaagcaagcagaagagcaaattgcgatgccaaaagatattacgacacagtttcaaggggctacattagcttttgaaagcgccctttccagcacgctgtggcttatcattgcggccatcgttgctatgtatattgtattaggcgtgttatacgaaagttttattcacccaattactattttatctaccctacctactgcgggtgtcggtgctttattggcactgatggcagccggtaatgagctagatattattgcgattattggcatcattttgttgattggtattgttaagaaaaatgccatcatgatgatcgatttcgcactggccgctgaaagagaacaaggactatctccttacgaagcaatttatcaagcttgtctgctacgttttcgccctattttaatgaccactatggctgcgttattaggtgcattacctttaatgctaagcactggcgtaggggctgaattacgccaaccattaggtgtatgcatggtgggaggcttaattatgagtcaaatactcaccttatttaccacccctgttatctatttgctgtttgataagttatcactttaccttaatcgccataaacgcgttgaacatgataatggagcggtgtcatgaagctgtttgctctatttattcaacgacctgttgctactacactacttagcctagccatttctctttgtggtgcgttaggttttatgttgttacctgtcgcaccactgccacaagttgattatccggtcattaatatttatgcctcattaccgggggcatcacctgaaacgatggcttcttctgttgccactccccttgaacgctccttagggcgtattgcggggattgatgagatgacgtcaagtagtgctttaggtagtaccagtatcacattagtatttgacttaaataaagatattaataccgcagctagagatgtacaggctgcgttaaatgcctcacaaagcctattaccttcaggtatgccaagtcgcccgcgttattacaaatcaaatccttctgatgcaccgattatgatcttaacgctgacctcagagacacaaaataccggtgagctttatgatctcgcatcaacacgcttggcacaaaaaatttcgcaaattgaaggagtaagtgaagtttccgtagggggaggttcattgccggctgtgcgtgttgcactcaatcctgatgcgctatttaatcaaaatgtcagtcttgatgatgtacgcaaagccattagtcaatccaatgtcagaagaccacaaggctttattcataatgatgaaaatcgttggcagatacaaactaacgatgagttaagcaaagctcaagattatcgcccaattattgtgcattataatcaagatgctatcgtgcgtttaagtgatgttgcccaagtgacagactctgtacaaaacgcacgggcggcaggaatgagtggtggtgaaccggctattttactggttattcgccgtgaagcaggcgccaatatcatcgaaactgtcaaccgcattcgtgatgaactccccgaattacgtgagctactccctgccagtgtcaatttaaaggtagctcaagatagaacccccactattcgtgcctcgttagcagaagttgaacgcgcattagcgattgccgtggcactggttattttagtggtattcttatttctacgttcagggcgtgctaccttgatccccgctgttgccgtacccgtttcattaattggtactttttcagccatgtatttatgtggctttagcttaaacaatctatcattaatggcattaacggttgcaaccggctttgtcgtggatgatgcgattgtcgtactcgaaaatatctctcgccatatcgaaaatggcttaaaacctaaacaagccgccctaaaaggggttagcgaagtgggctttacggtactttcaatgagtatttcattggtggcggtatttattcctctcttgttgatggatggccttgtcggacgactttttaaagagtttgccattaccttaaccaccgcgattgggatctctttatttgtctccttaacattaaccccaatgatgtgtgcccatttattaaaaggcataaaacccaaagcacagtcacatttacgcggatttggtaagttaatttttcgcttacaacaaggttacagtgtcacactacaagcggcattacggcataaacgctggatcatggctatttttattaccaccttaggactgaatgcttatttatatatcagtgcgccgaaaaccttttttccagatcaagataccggtcgtttaatgggatttgtacgtgcagaccaaagtatttcattccaatcgatgaaagaaaaaatgacccgttttatgcaggagattaatgcagataaagatgttgatagcgtcacgggatttacggggggaggacgtattaatagtggatttatgtttatttcacttaatccgctctcagagcgcacagatagtgcaaatcaagtgatcaatcgccttcgtatcaaactggctaatgaacccggtgcaacactatttttaatgcctgtacaagatgtacgtgctggaggacgccaagctaatgccagttatcagtttactttactcgctgatgatttaagtgaattacgtaaatgggagccattaatacgtaaagcgttaggcgaattacctgagctggttgatgtcaactcagataaagaagataaaggtgccgaaatggcactcacttatgatcgcgatactatgtcgcaattaggcattaatgtcagtgatgccaataatttattaaataacgcctttggacagcggcagatctctaccatttatgccccgctaaatcagtataaagtcgtgatggaagtgtctgaacaatatacgcaagatgtttctgcactggataaaatgtatgtgatgaatacacaaggtgaacgtattccattatctgcatttgccagttggtatcccgctaatgcacctttaagtgttaatcaccaagggttgtctgccgcctctaccatcgcttttaatgtgccagagggctataccttatctgatgccattaacgccattgagcgaaccatgacagagttaggtgtacctaacacggtacgaggcacctttgcgggtacagcgcaaatttttcaagaaaccattaagtcacagcttatcttgatcttagcggctattgtcaccgtctatattgtccttggtgtgctttatgagagctatattcatccattgactattttatccacattgccttctgccggtgttggcgcattattagcactgcgcttgtttgataccccctttagcttaattgctcttattggcattatgttgttaattggtattgtgaagaaaaatgccattattatggtggattttgcgattacggctcaacgagaaggaaaactatccgctcaagaagcgattattcaagccagtttattgcgtttccgccctattattatgactaccttagccgcgctctttggcgctttacctctgatgctaagtagtggtgatggtgcggaattaaggcagccattaggcattaccattgtgggtggcttgcttatgagccaattattaaccctgtataccactccgattatctatctgttttttgatggtgttcgccaacgttggcaacagcgacgccataacaaaaaagaggcaaatgcatgaaactaagaagtaagctatttttggtgatcttcgcgacttgcatgatagtggtatttgctatgcatatcggtattcgtagtagcttccagcaggggtttattggctatatcaagaaaaacagtgaacagcgggcaaccttgttagccgaagcgttaagcgatcaatatcaattaaccggagattggcgttttctcaatcgagacgatcgctctatttatcagatactacgaaccattgaccaaataagtcaaagtggtgaaggccctgcccctcgaggatggcgtactcagttttggatcgtcgataaacagatgaaacgcttatttggccatgataatcaatttcccgcagaaacctttaaaaaacctattacttatcatgatgaaattgtcggctgggtgattgtcagtgcagcggataaaatcagcaacgaagcagatattagctttgataagcaacagttacgcaccagttggatcattgccggcttaacggtgctttttgcgctattaattacgttaatactgtcacgcagcatgatccgcccagtaaagcgattagtggaggcaacccataaattagccgctggcgattttgctgttcgcgtgaccccaaccaataaagatgaaatcagccagctagcaacggattttaatcaacttgccagtacactggaaaaaaatgagcaaattcgccgtgattatatggcagatatctcccatgagttacgtacgccattggctatcttaaaaggagagcttgaagcgttacaagatggtgtaagaaagccaactgcagaaacgttaaattcattactctttgaagtaacaaatttaactaaactggtaaacgatctacatcagttatcattatctgatagaggctctttgacctatcgtaaggattttattgatattaatgaaattattttgttagctgtcgcctcttatcggcatatttatcaagccaaagagattgctttacagactgatttagatgataacgtcaaactgattgttcaagctgatccggataggttgatccaactttttcataatctattagaaaacagtgttcgttataccaattctggtggtcaattgcatattagtagcaaaagagaacataataatgtgttgattgtgtgggaagatagtgccccggggctagataaagcacaatatgaagcggtattccaacgtttttatcgggctgaaagctctcgtaatcgttccagcggcggctctggtttggggcttgcgatttgcgaaaatattgtcgaagctcataatggtaaaatcatggctatgccatccgctatcggtggagtaaaaatacttatcgtattacctgtctattctgaagataattaaattttgctctattgattatactgaatattattgtcctaattgataactattgagccatatagacaatgaccacgaccacatctacatattcaattttaatcgttgaagatgagccgaaattggcacaattacttattgattatcttcaagcatctgattatcaaacgcagtggctggcagatggtactgaggttatacaacatatcaaacaatctcattacgatttagtcctgcttgatctgatgctaccgggtaaagatggcattaccctatgcaaagagttacgtcagttctccgatattcctattattatggtcaccgcaaaaacagaagaagtagaccgactattagggttggaaattggtgctgatgattatatttgcaaaccttatagccctcgagaagtggttgcccgtgtaaaaacattattgcgtcgctattatcggccacaggatattgtgcaaaatagcgccttagttattattgatgagcaggcttaccaaattcaatatcataataaaattcttgatttaactaccgctgaatttcgtcttattaaagcattagctacacaaccgggcaaagtgttaagccgtgaccagttaatggatcatctgtatgatgattatcgcatcgtaaccgaccgtactattgatagccatataaaaaacttacggcgcaaacttgagcaacttaacgatcaaattgaatttattcgttcaatttatggacaaggctatcgttgggaaaccgcagcctatcgttttcgatgatattttttcaggaatacattgaacctcgctacagttaagcgctagaatcctcccctttatgatatacccttaccttttgtgtaggggactgacttgaaatcagaaccaggaaattaatcatgtttacacccgaattgctctctcctgcaggctcattaaaaaatatgcgctatgcattcgcttatggcgcagacgcggtctatgcaggtcagcctcgctatagtttacgcgtacgtaataatgagtttaatcacgaaaaccttgctaaaggaatacaagaagcgcatgaattaggtaaacgcttctatgttgtggttaacatcgccccccataatgcaaaattaaaaacctttatccgtgacttaaaaccagttattgatatggggcctgatgcgctgattatgtctgatccgggtttgatcatgatggtgcgtgaagctttccctgatatggatatccacctttcagtacaagctaacgccgttaactgggctaccgtaaaattctggcgtcaaatgggcttaactcgcgttattctttctcgtgagctatctattgacgaaattgcagaaattcgtaaacaagtccctgatatggagcttgaagtcttcgttcacggggccttgtgtatggcttattcgggtcgttgcttattatcaggctatatcaataaacgtgacccaaaccaaggtacatgcacaaatgcctgccgttgggaatacaaagttgaagaaggcaaagaagatgaagtggggaatatcatcgagaagtaccaacctatcccggtaaaaaatgttgagccaacgttaggtgtaggtgcccccactgataaagtgttcttaattgaagaagctaaacgtccgggtgaatatatgactgcgttcgaagacgaacacggtacttatattatgaactcaaaagatctgcgcgctatcgaacacgttgagcaattaactaagatgggtgtacattcactgaaaattgaaggtcgtactaaatctttctattattgcgcacgcacagcacagatgtatcgccgtgctattgatgatgctgttgcaggtaagcctttcgatccgacactgctgacaacgctagaaggtttggcacaccgcggttataccgaaggttttttacgtcgccatacccatgatgcctaccaaacctatgaatacggctattctgtatcagatacacaacagtttgtaggggaatttacaggtaaacgtgttaacggtttagctgaagtggatgttaaaaataaatttatcttaggtgatagcttagagctaatgacaccaacaggaaatattcaattcactttagatgcgttatttaataaaaaacaacaaccgacagatgttgctccgggtaatggccatgtggtttatttacctgttcctgacgatgttgatttaaactttgcactgcttattcgtaatctgccaggaacgacaacccgtcaacctcataaaattgatgcggtagaagtgaagtaaatcatcattatctgatttgatgtggtcaatttcaaagatagatcacatcaatacctattcatttgccgtattatctatttcgaaaaataaagaactagaatgaatacagtaagactaggaaccacctccttggcaaatccaatctcccttggatttgccttttctttttttatcccccgctatttttattattattttttgagtaacgtaaattgcttttggctttggtgatactttgtaaaaaaaatggtaattcgcctaatatccattatctttaaataagtcatattaattaaggagtcatattgatgggccaaatcagtttgctgattatcaatggaaaaaactcaggcaatgaggctctgcgacaagcggtttatcaacaacgcaaggaaggtaatgatatccaagtcagagtgacatgggaatcaagtgatattcaacgctttgtgcaagaagcactacatattcaagcgcaaaccattatcgccgcagggggtgatggtacgatcaacaatgtcgcctctgagctggttcgtttagccccctcttcgccccccgcgttaggcattatccctttagggactgcaaatgattttgccaccagtgcacaaatcccattagagatggacaaagcgctcagtttagcgattaaaggtcgcgccgttcctgtcgatattattaatgtgaacaaaacacattactttatcaatatggcctcaggaggctttggtaccaagatcaccactgaaacccctgaagcactaaaatctgccttaggtggtgctgcttattttattaatggtttattgcgtattgataccttaaaagcggatcaatgcaccgttgaagctgaaaattttcattggaaaggtgaagctttaattatcggtattggtaatggacgccaagcgggaggtggacaacaactttgccccgaagcactgattaatgacaataaactcaatattacccttgttgaagcccgtgaattgcttccttctctattaaccagtctgttcgatcgtaagaaaaatgacaaaattattgagcgagaaagtgattgggtcactattagtgcggctcatgaaatggtatttaatttagatggtgaaccccttttaggggataaatttgaatttattgtactacctgaagcgatccactgccggttaccgccccaatgtgacttgttatcttaatgtagataaatgacaatcactatcatctcatcgtgaactggagtaagtaatgactgatatagtaagtttgttaggtgctgatgctaactcattattggaacatcgctgccaaaccatcccaagcgaaaatctctacctgccaggttctgactttgttgatcgtgtgatgattgataacaatcgccctaataccgtattgcgttctatgcaaaccctgtttaaccatggtcgtttagcaggaacgggttatctttctattttacctgtcgatcagggtgttgaacactctgccgctgcctcatttgccgcgaacccactctattttgatcccaaaaatattgttgagcttgccattgaagccggatgtaactgtgttgcttccacctatggtgttctagcttctgtttctcgtcgttatgcacacaaaatcccatttttggtaaaacttaatcataacgaaacattaagctatccaactcaatacgaccaaacgctatatgccagtgttgaacaagcctttgaaatgggcgctgttgctgtaggtgcgactatctattttggttctccagaaagccgccgccaaatcgaagagatctcgatggcatttgaacgtgcccatgaattaggcatggttaccgtattatgggcatatttacgtaatccagcctttaagaaagatggggttgattaccatgcaagtgctgatttaacaggtcaagctaaccatttagcatcaaccattggtgccgatattgttaaacagaaaatggctgaaaataacggtggctttaaagcgattggttttggtcatactgatgagcgtgtttacactaaactgacgagcgaaaaccccattgatttagtgcgttaccaattagctaactgctatatgggacgtgcaggattaattaactcaggtggagcatcgggtaataatgatcttgctgatgcagtacgtactgcagtcattaataaacgtgctgggggcatggggcttatcttaggtcgtaaagcctttaagaaatccatgaaagacggtgttgctctaattaatgccgtacaagatgtctatttagataaatctgtgactattgcttaattttttacgattaaattacgcattgaagcccctttaataggggctttttgatatcaccaccagcgatgaaaatgatgtacagggccgaaaccttgtcccacctctaaactgtctgcctgttctaacgcttgctgtaaataggcttttgcttgttcaacacaactttgccaatcagaaacttgaggacgaatagcagctaaagcggctgaaagtgtgcatcccgtaccgtgagtattttttgtattgatgcgcggtgaagtaaatcgccattgcccatcttgggtcaataaccaatcaggactttctttctcgcttaaatggccccctttcatcaataccgcctgacaaccttgataaagtaatgcttcaccttgttgtttcatagttgtttcatctgtcgcgatatcacaacctaatagtgctgccgcctcaggcagatttggcgtgatcaaatcaacgcggggtaataactgagtgaacattttatcaatagcatcaggttgtaacagtggatcgccgcttttggcaagcataacagtatcaagtacgacaaaaggaatgggatattgctgcagtttatcgcaaacgacatcaataatactggcattagaaagcataccaattttagcgctatctattctgacatcagaaagtaccgcatctaattgtgctgcgacaaaatctggggataaatcatagacagagtgtacaccacaggtattttgcgctaccagtgcagtcatgactgttgtgccatatacacccagtgcggaaaatgttttcagatcagcctgtatccccgccccaccactcggatcggtgccggcgatagacaacgcgttatatctcactgattaactcctcctttaccagttacagaaaagtcgggctctgttaatcagcacagtgaccttgacttccctacgctggcattatccagatcaggttatacgggttcatctcagccaataggcgccccgagccaaagcttatatgatataagccacaagagtatcgcatgcagaagataaagaagctagtttgatagtgacaacctttatcagctcacttaacgtgctttaagttaacttttctattttagaagataaattaatctagcttatctataatagaggcaggctcgatgatttatattttattagctatcaatcttgaatatatattctcaacataaaacaatgataagcataaaataaaatattttgctcattttaacgacaatcgatatataatctgctaaatgaggtatttataatgcatttcttgaccaccactgatatgcggaggggctaaatgaaaaatgaaccatcgcaacaacaaaatggacaatcaatgccttatcttattcctgatgcagattttaatgcgaaattaaaactaccagccaaaaatattgaacatacaatacaatttataacccaaggggtaaaagatatttctttagacggttttgaaattcctacgggctatcggttagttaaagctgttcatagagatcaatatagacttattactactaataaagaaagcgaaacagcctatttagttgaactaagatttcgacaagatatcgtttatggacaaacaacatgtactcaaataaaagtatggcgttctcgccttcctaaacatcgcaatgtaataagagatttaccccgcactttcttttataacctattaaaagtacacaatattgttgtgactgatgaggaacaaacctctgatggtaaaggtttttggattgatatgattttatgggcttttagtgaaggatattatatttatgcttcagatggcactgaaatggatcgaccattacatttaattgatagtgtggaagacttttataataaatgggatgcgttttgctgggaaaaagatcgcgatattcatactcatcgactattagttattagtaaagaaccgttatctcaataattaaacgattttttcttaaaatctgtgggttttcccctcgttactcataactcacagatttaccccttctttaggggtgctatagtgaagtgatcactttatccagcagccataaaacttaaacactttataaacacatcttcgttttttgctttttttatttaactctcattattaattactctattatcctgctcctttgcaattttgcccatataacaaacactattcattattaacgttatattaatatttcaatatgcgataaaaaaaccgatggatatgtaatcgttatattatgttataatgttttttagataatatttaatcgttattatcttgcttagtttgttttattctaaaatctaataaattatgtatcattattaagcttaataaatcctcaattatattaactaatactataaataattatcttttaaatgggagcaactgagatacatctctttgtaaccatttgaaattaaatataatgttattaaaatagttcaatttcggatagctcttatctgaatatttcactaattcaataacactatggcacaaatttttttaacattaccagaaccaccgcaatgccgtattcggagttatatatgtcatctacctattttcactctagcctattagcagctacactgttttcagttacgttaacagcacctgcttttgcttctgaaaatacgcaaaacacacctcagactattacgacaaaaaaacctcagccagcagagaacactttctcagaaaaaaatgaggaaagctattggggaaaatttaaacgtaatcttacccaaacttgggataatgaccaatataactactatttaccggtatggacttggcataaccgttttacttacgataaagaaaaaaccaatcgttataacgaaacgccttggggatttggtatgggtaaatatcgttatgataatgagggtgattggcatggcttatatgctatggcctttatggattccaataatcgtgtacaacctattatgggctatggttttgaaaaaatgtggtatcccggtggagatagagagggttttcgcatgggggcgggctttaccttaagtgtgactgctcgtcatgagtataactatattcctatgccattacctctaccgctagtgtcagtcggttatgaacacttatcattacaggcgacttatgtaccaggaacctataataacggtaatgttttatttgcttggttacgttggcagtgatcgattgccctaataaaaaataaagtgactctttttagagtcacttttttaatatcgcgtttttcttatctttcgcttaggctaacttagccaagataatttaactatcttgccttgcttgtgtggttgtcagcgattttttagttcttgagatcttaaaacctatccagagcaagcctacccaaaatggcatcaaaataacggaaatattaatttttggcatcattagaataatgaccaaaatcatacataaaaaggctaaacacagatagttaccataaggataccaaagtgctttaaatgaaggctctacaccctctttaattttagctgcacggaattttaagtttgctaaacagatcatgatccagttaagcactaatgttgttaccactaatgccattaatagctctaaagcttgatcagggagtaaatagttaaccaaaatcccgagtgatgtggctatcgcagataaccccaaagaaataacaggtacaccacgtttattaaccttagataatgaatgcggtgcattgccttgtttggctaaaccgtacagcatccggctattagaataaacgccactgttatagacagataatgccgcggttaaaaccaccgcatttaaaatatgggcaacaacaaaattatctaaattatggaaaataagtacgaaaggactttctcctttcaccacttgggtccaaggataaagagaaagcagtacaatcaatgaaccaatatagaaaatcaaaatacgataaacaacttggttagttgctttgggaatacttactttaggattttctgcttctgcggcggtgatccccaccagctcaagtcccccaaatgagaacatcacaatagctaatgcagacataaacccagtaaagccatgagggaagaaacctagctcccataaattgctcacagaagcttgcggaccaccattaccactgaccaataaatagctaccaaataaaatcataccaacgatcgccaaaacttttataatggcaaaccaaaactcggtttcaccatacattctgacattaattaggttaattaaattaatagcaacaaaaaacaccgctaccgaaacccacaccggaatatcaggtaaccaataattaatatattttcctgcggcggttaattcagccataccgacaagaataaacataacccagtagttccaacctgataaaaagccagcaaatggcccccaatacttattggcaaagtgactaaatgaacccgcaaccggctcttcggcaaccatttcaccaagttggcgcatgatcataaacgcaataaaaccaccaatcgcatagcctaatataactgatggcccagtcatattaatggtttgcgcgataccaagaaacagaccagcgccgacagccccacccagcgcaatcagctggatatgtcgatttttaagaccgcgctttaattctgcttgttgcgactctttcgccatacatcctcttttcttcatctatcaggtaaaagtgtaaatcaatgtttacgattttgtttatttcaagccaccattaaaacactaatctgacttgaataacaaatacattttgtgatagaggggaaaaagcatagaaagcgggttttttacggctgcttagaggggaataagatggtaaagcgacagataccttgctgaaaatcttcgccttgatcgcaaaaattatctaacgccacaaggtacaaccccaagctgatagctaatataattattaagctaataattattttctttgcgttcaaattaaaatcctttaaatacattttgttaatagtacttattacaaaataggcattcgctttaatacgataacaacgcctatcactgttgttataaaattcgcaataagttatctctaagattaaatttagcatagttttcataaagaaagttaaatgcttcctcgacagaaaacagataattggcactattttttcttaattgtacgcaaaataggcatttttattttaattacacattttgccaacacatagaaacagcaatcaactaatatggatttctctgtttgccactttttgtataatattaaggagttaattttgttttttaccttaacttcatcgatagaatggaactgtaatgccacaagataatcatctcgcattagtttgcgcgctaagtaaatggattgaggagcatttaggtcgcgtaatacaccttgaagagctagcggcttactccggctattccctttggcatatgcagaaaatttttaaagaagtcacgggcacctctttaggaaagtatattcgccaacgccgtttagcgggggctatccatcttttacgcaccagtgaccgctcaatatttgatattgcattagatttcggctttggctcgcaatcacactttacttatatgtttcgtaaagagtatggcatcactccatttgactttaggcaaaatcaaaatatcgagttagagacaaaacagcccttacatttgcaatcactttgttgtgattagactgacttttatgtggcatagagatattctctttcgtgtcacataaataaagccccagttatgtgatgataatacctcgcccttaccaaccattaactgctttactttaatatggggatgataatgagtattaagcttatcgttattgatttagatggaacgttactaaacgaacaacatgagatcacacctgaagtacatcaagcgatccaacatgctaaaaattctggagtgcatattgttcttgcatctgggcgatcttttaacggcatctctccctatttaaaagcactgaatcttgatacatctgataacttttgcattagcaataatggtagccaaattcaccaagcagaaaatggtgaaattatcaccgaagacttgctcaattttgaagattacctctattttgaagatctctcccgtgagataggtgttcactttcatgttttaagtgataataaaatttataccaccaatcgccatattagccattttacttgtcgtgaagcattcttaacgtggacacctctctattatcgccccttaagcgaaatgcaaagagatatgcgctttagtaaatttatgatcgttggtacacctacggtattagataacgcaatgcaatatttacctgctaatatctatcaacaatacagcatattacgtagcgctccttattttattgagatattaaataccgatgtcaataaaggaaacgcggtacaaaaaatagcagaacatttaaaaatcactccagagaaaataatgtgtattggcgatcaagataatgatttagcgatgttacagtatgcgggattgggtgttgcgatgggaaacgcccctgaagagatcaaaaaagtggcgaaatttattacattatctaataaagaacacggtgttgctgtcgctatcaataaatttatttaaacacgatattttttgtgttttatcactaatgtctacaaaattatatagcaattgtgatcctagctagaggatcacactgcttgcccccctgctttatagccatttattatgctccttttcctgctggatcaggattaaacacctatttcttcttacatctccgtcagaatttgttactatcaattctcttttcgttattcaaacactatttttacaagataattacctagtaattaggctaaatatagaataacaagtataaattattaatatattctctctcagacaggtagtattagttatgctttcaacaaaagacatgctagtccttggaatgatggtttttgctcttttccttggcgctggtaatattattttccctccaatggcaggtttccaatctggaaaccaatggtttagtacgtcattaggatttttggttacaggtgtcttactcccttttttaaccttagtcaccgtagctattcgtggacgtggtgaacgcctttctatcgacttgccatcatggtttgcggtgttattttggattgcactttacctgattgtcggttctacctttgcaatgcctcgggtcacgaacaccgcctatgagatgggatttttacctcttggtcttattgaaaaaaatactacgacccatctgactttcgcattaatatttaacctattaagtatgttctttatgcttaaacaaggtacgatgatcagtgccatcggtaaattcatgaccccagcgctcttaatacttctggttgtcgttggtattgctgtagtggctaaaccgctttcccctattgaagagcctaccggcctttatgcggtaaatggcttcttctccggtattattgacggttatcaaaccatggatgtgctatctgctatggcttttggcgggatcgtcgctcgtgcgttatataccaaagggatcaccaatcctaaacaaattggttttatcaccataaaagcggggatgatttcggttttactcttagccgccctttatttatgtttattctatttaggtgccacaagtcacgcagtatctgtttttgctgatccggcactaaatgccactaacggtggtcaaatcttctcacgctacgtagacgctttatttggctctgtcggtacttggttgatgggcgggattgttttattagccagtatgacaaccttagtcggggttactagtgctgcggcagactactttgcgacattccatcatcgtttaggctatcgcttctgggttgtagtatttacactgttaacgacgttagtctctacttttggtcttgataccttattacgtgtcactattcctgcattattaatgatttatccaacatcggtgacactagtcttactacaatttgttcgccataaactaaaatcaccgcgttttacttaccgctttacaatctgtgtcattgttttaatgagcctacttgacacattaaaacagttaaaatggctaaatggagatttattacaactatttagttacattccactgtctgagtatgggctaggttggttattaccgggtattattgcattcgcaatttcattactaattagtctcagttttaaagaaaccgacacagaaattgctacacctaatacagtaaaataaatccattatagcaactagccccaaagtaaatggtcactttggggctagtttttatccttaataacgatcaattatctgaatgttttattggctcagttgatggctgtatccacttagttcgatatttatcaattaacgccattaaaatagcttctgactgcgcatcaggaatacctttaatatcacttggtctaaaatgcatttgaaatgcgctaaccactttttgcgtttcaggatctaatatccctgttgttggtgtttgataaccatacttcgctaacaaggtttgaaaattagcaatatcaacaggctccgatgcagctcttcccgctaaatagaaagtaactgtttcatcatctggccaagcgcctattccttgtttcgctaattcagcccatgggaaaagtggccctggatcaactttgcgttgtggtgcaatatcactatgcccgactacattttgtggttcaataccatagcgttgaataatatctttcatcatcatagtaatggttgagagttgttctgcggtataaggtaaccactctcttaatgtaccctgatcgttataaccataattcactatctcaataccaattgaaccatcattcaaacctgcactatttccccactgacttagccctgcatgccatgctcttttatcttcactcactaaagcaaacacaaccggcttaccatcaacataatttggtttggtaggaattaaataatgactgcttacatttcccgaagttaacgtttttaacgattctttatcgtcaacggcggtgtagtgcataactaaaaattttacgcgattatcttgcccaggattattgggaacaacttgtgcaaaataatcccccctatcaataagctgaggttgctgaacacaacctgaaagcaaccccaaagtaacaagtaaaaagagactgtagcgactaaagatcattatccatcctgaatacattagactataaatttaaggctaaattgtagacaaaaaacccatattaaaaaatatgggttttgtattttggtttttttttaataattttttaatgaataccgtacttgctcaattattgcctcaccttttcacagcggactaacggctcattcggtaaaggctctttatcccaaataccttgctctatatcattttgtaattcagggtattggcgaatattgaaagtgggtaatacaccagcttgtcgctgttggttataatctttaattaacttcaaagcgacgcctgaaagtaaaataatggcaattaagttagtgacagccatcaatcccatcgagagatcagccattttccacactaacggcatttcagccaaagcgccaaacatcaccatcgccagtacagctgatctgagtaagaatagccctgtcatatgattgcggcctaaaaaaatcatattactttcagcataggcataatttgcaataatcgatgtaaaggcaaagaaaaaaatcgcaacagcaataaaagtactcccccaaccaccgacagttgacgataatgctagctgggttaactgaataccattaataccatcttgataattatctaacacacctgaagataaaataatcactgcagtcgcactacaaatcaccaaggtatccataaatacccctaacatctgaatataaccttgcgatgctggatgaggtgggtaaggtgttgcagaagcggcggcattaggtgcagatcccatacctgcttcattagaaaataggccgcgttgaataccttgggtcatcgcttgactaataccatagccaattgcccctgctgcggcttcctgtaaaccaaatgcgcttttaaaaattagcataaacacttcaggtaaacgttcaaaatgatctgcgacaacccaaaatgctaataataaataggcgatagccataatgggtacaaccagctcagcaacacgcgcaatccaacgtagaccgccaaaaataataaagccgctcatcaccaccagtccaataccaacatataatggatcgaaattaaatgctgatgcagctgcttgcgctattgagttagcttgtaccgcattaaaaacaagtccgaaggcaatgatgaggaaaatggcgaataatacgcccatccaacgcatattgagaccttttgtcatataataagcagggccaccgcgatagttaccttcatcatctttagttttatacaactgtgctaatgtactttctattaaggaagtcgccatacctataattgcaactacccacatccaaaaaatggccccagggccacctgcggtcagcgcaattgctacaccggttaagttacctgttccaacacgtgcagctaaacttgtacataaagcttggaatgaagagatacctgatttatctgacttatgactattttttaaaatagaaaacatatgaccaaaatggcggatttgaataaatcctgttcgaatagtgaaataaatacccacaccaaggagtaagtaaataagtacatatccccataaaatgttatttgcaaagttaattagccctgtcaaattaatccccttatgtaataacgtatataacctatccttacatcgctattgaaataaaaaacagataaacacctataattgaaccaataaatggcttatgtatgtctttatctcatatcaaaaatgattgtctaaaaagcgacttaaatgtaacacaagattatacgatatgtatattttttgtttatttttttattatttaatcattctatttaattatcttattaactagaaactttagcataacaaaataaaaaacctataaatatcatttagataaataattaaaacattctatattatataataaaataaatttactgatctacaaaatattgttaattgattatttaacaacatgctaaaagatgaaaaaaacaccaataagaattgattgccaaatatacaattttcattttaaagtgagatttaaatcaaataagtggatttattaattaaatattctcttagtagtaatgctaataagaatttgaaaagtgcattagcattataagaaatgcatagtgaaaaaataatataactttaacgaacggaattattattttttaacaaaatattaataactttactttaggggcaggactattacgaactctattaataaaaaatgttttaaagtactccgtttttcttctctatcttctttgtttttacttaaattttattttacttatttccattttctgcttatttattagcgccttttcccttttgtttccataacaatttaatgttgattattttttgattaataaaaaaatcaatattcacgtaaatttacttattaaccatttagttaattttatttataatacatttttccctggtgttgtattattttttgccctgtttccccaacagggcttttttttatccttatttttcattctgttagtgattactcaatcgtttttataaaaattaacttaaaaaataaaacataaaatagacaatattaacattttattaaaatttaattattactttatctataatgtaaaaataattgatataaataaaattgatctagatcaaatataaaactcgtcaaaattggttactaactcagggaaacattaaaaaaactaattttaaatataattaattcaatataataaatatgttaccttggctagctaaaaaatgtaccagtagaataatttatttaaaggcaatattatttactactaataactattagtaataaagttttttatccattatctatacaattgctttctatttctttttttaaaattttttaaaataatttcttttagttacttgcattactcatcgctctcttttactttactctcatataacaagggagaaagtacgatgggttataaccttgctgaacttacacaagaagaaaaagataaaattaatgtcaacctagccgcttcaggggttgcctttaaagagcgttataatatgccagtagtagctgatgcgatagcaagagagcaacctcaagctttacaaagctattttcaagaaagagtgaccttttatcgagcacgaagccaacactattctcgcttaccttttgagtcgaaataaataccgtgctcaatattaaaaaaagagataaacatttacgtttatctcttttttattttcaagtaatgatataaaaaatgggcgaaaaatcgctattttttatcagttaaatgatactatttacttgatatataggtaattttattctcatcacaattaacttcaacattgtaacgtagatcggtacgagcacctcttacatccaagataacatgatagctattatctcttttgataacatcgttcgcattaatattcgccacaggttttggtcctagcgcttttttatcatcctgccagcgaggtaatcgattgagtaaataatcatttttcactctagtggcaagttgttctttatcaagattaacacaactagcaaaaggggctgagcgcacaacattattatcattattcacatttgtgacactttctgcagaggctccaaaagaaaccgcaagaaaaaaacctgcaccaagtatccctgtttgaccaactaatttgcttaatttcataataacctcccgaaaatatcccttaaagcaggacgagtttctattaagcatagcataagcaaaacagggtatttgtgacatttgttaaaaaaatgttttaatcattgtcatcgtcaaacacaatagagactgattcacgagtcgtgtgtttttctcttaattcttgagcgaccaattggatcgcctcaccactactcataccttcggacatcagatgttgaattttttctactgctttttgttgttcttcatgtgttaatgtaggcattcctagaaacataatgttactcttatcttaatcgatttctatgttggtctttacaataatgcaatcactgaactaatgattgatagtgtaaatgatacagaatacttgtttaaatggtcataaaatggatatgcaattacagcaacgtgaattaacttatacccctgatttagcattacgggtatttgcacctatcgcctctttgtcttggtctagtttactgcattcaggttttgccgaacatcaccataatcgttttgatattgttgtatccgatcctgctattaccttagaaacacgcaaacaaattaccactattaaagagaaaaccggtcgagtcaaacgctctaaaaaagatccctttacgcttatccaaacagcattagacgcttttaattttcatccagtcagtgatgaaacgcttccttttctaggtggcgcattaggtatatggagttacgatttaggtcgtcgcattgaaatattaccagaattagcaaaaaatgaacttaatttcgctgatatggctatcggtatttatgattgggcactaattgttgaccatcaactgaaaaaagccacattaataagctaccaagatattgacgcacgtctccaatggctagcaaagcacgctgataataacacaatagaaaaaaaagaaccttttgtcttaacttctccatggcaatcaaacatgagtagtgatgaatacaatgaaaaaattgctaaaattcatcaatacttactttcaggggattgctatcaagtcaatttagcgcaacgtttttgtgctaattatagcggtgatgaatggaatgcatttttaacactaaatcaagcgaataaagcaccattttctgcttttatgcatttacctcatcattttgttatgagtatttctcctgaacgttttattcatttaagtgatcataaaattgaaacacgtccaataaagggtacccttccccgtaaagcgcatcccgatgaagatgatgaacaagcgcaattgctggcaaattctcgtaaagatcgtgctgaaaacttaatgattgtcgatttaatgcgcaatgatattggtaaagttgccacaacaggatcagtcaaagtacctgaattattcgttgttgaacgctttcccgccgtacaccacttagtcagcaccattaccgctgaacttccagaaaatttaaacgcaactgacttattacgtgcggccttccccggtggctccattactggcgcacctaaaattagagcaatggagattatcgaagaactagagccacatcgtcgccatggatattgtggtgccattggctatattagtttttgtggtacgatggatactaatatctcaattagaaccctactgacggaaaaaaataaaatttactgttgggcggggggtggaattgtcgctgatagcgttgccgaacaagagtaccaagaaacctttgataaacttggtcaaatattaactgttttaagtgaagtttctcccgatgacacttattgatacctttatcaatcgctttcaacttactttacctgagccggtaaatcagcctattgatgctaaaaaatcggcagcagttttactgccgattatcaataagcctaatccaacgatcctcttaacagagcgcgcatcaacgttgcgctctcatgccggacaagttgcgctccccggagggaaacgcgatccacaagataaaagcctcattgaaacggcattacgtgaagcccatgaagaggtcgatattccgcccagtatggtttctgtgatcggccaattagccccattacgcagttcagaaggttatttagtaacccccattgtcggggtgatcccccccaatttatctttacggcataatcccacagaagtcgcttctgtctttgaaatgccattaagttatgtactcaatactcagcgctatttaccgttagattttcgtcgtgccggtaaaatgcatcgcatctatttttacccttatgaagggcatttggtgtggggactaaccgcagctattttacataacctcgcgttgcatattacttaatttattattttattaccctacgctatctttttatcgtcaccactacaactgtacttagctattttaaaaaaatgttgtaaactagactattaacgggacgatataatcgtaaaaacgctccccttactataaataactatatttttattatttttttaaccctcactcttattaaggagtctgacgtgattagcgttttcgacatgtttaaagtgggcattgggccatctagctctcacaccgtaggccccatgaaagcggggaaagaatttgtcgatgatttagtcagccaggatctgattgcgtctgtcactcgcgtagctgttgatgtatacggctcattgtcattgacaggcaaaggtcaccacactgatatcgcaattattatgggcttagcaggtaatgcacccgctactgtcgatattgacagcattcccggttttattcgtgaagttgaagaaactggccgtttaccattagcaaatggattaaaagttgtcgattttccagctgaaagtatgcattttagcaatgataatctttcattacatgaaaatggcatgacaattcatgcttttgcaggtgacaaagaaatttatcgtaaaacctactactctattggtggtggatttattgttgatgaagaaaacttcggcaaatctgtgcttgacagccaacctgtttcttatccgtatgcaagcgctgaagagttattaaaacattgtaaagaaaccggattatcaatctctagcttaatgatgaaaaatgagctagatcttcatactcaagccgaaattagtgcctattttgctgatgtttataaaaccatgcaagagtgtatcgagcatggtttaaataccgaaggcgtattaccgggaccacttcgtgttcctcgtcgtgctgcgtcactaaatcgtttattaacttccagtaatagcctgtcaaacgatccgatgaaagtcgttgatcttatcaatatgtttgcactggcagtgaatgaagaaaatgccgcaggtggacgagtggtcaccgcaccaactaatggcgcatgtggtattgttccagctgtattggcttattacgatcgctgtattgaaaaggtcacgcctgaaatttatacccgttatttcttagcctcaggagcgattggtattctttacaaaatgaatgcttctatttctggcgctgaagtaggttgccaaggcgaagtgggcgttgcttgctcaatggctgccgcaggacttgctgaattactcggtgctagccctgaacaagtctgtgttgctgctgaaatcggtatggagcataacttaggtttaacttgcgatcctgttgcaggacaagtacaagttccttgtattgaacgtaatgcaattgcctctgttaaagcggtaaatgctgctcgtatggcattacgtcgtaccagtgaaccacgagtttcacttgataaagtgattgaaactatgtacgaaacaggtaaagacatgaacgcaaaatatcgcgaaacctctcgtggtggattagcaataaaagttcaatgtgactaattagcctgattttatttctaaagtccatttataataaatggactttttttatttaaataatagttaaaccgattaaaaataataaccctataaataacacctatattatttatctataaattacttctctattttaaaatgtcagttaataactatatacctaccaaatataggtttatttaactttcatttaatttattctcatttttataacttataatttatgtgtgtattaattttttattttatctaaaaaataagataaaaataaataaatacattgtttattatatggttaatatttcatcatattgaattttatcatttttttaacatgataataatataaaaaatatattttcaaacgaaaaaacaataatgataattattatcaatatcatcttttaaatatatgaaataatatgttgcctttcataaataatatgatatcttctgcatcaagtcattggggagtagcctgtcttaaaataaatctcattattttaagaagtctgtatcaacatactcgcttatttttatttagcgtggtacagacgccattatttggttggcaagaccatagacacataattgtacttctttggttgggggtcaattgtgtgtatatggaaacaccccaaccgaggctattgttatgagtttttacgccacaattattctcgcccttgctctttctatggacgcatttgccgtcgctgtctgtaaaggcgccaccttacataaacctcattttcgtgaagccctccgcaccggttttatctttggtattattgaagcaagcaccccgattattggttgggcattaggtttatataccagtcaatatattattcagtgggatcactgggtcgcctttggtttattggttatattgggtggacgaatgatttatcagagtttaaagcgtggtgatgattgcatttgtgaagaggctcctcaacgtcacggttcactctctttaattgcgacaggtattgccaccagccttgatgcgatggcaattggtgtcggcttagcctttctacaagtcgatattgtccataccgcgatgaccatcggtatgatgaccatgattatggcaacactgggtatgctgatcggtcgctatattggccctgtgcttggcaaaaaagctgaaattatcgggggtatggtgttgattgctatcggctttaatattctttttgaacatcttgatctgtttatgtacgcacattaagtcgtcataatatgaaaaagcttaggtatgaacacaacctaagcttttttattctaaacacgttgataaacacgaattaaaaaatcagtttcacaagcaaattgctctgttttatctaatgtctcttttacctcttcactcgcacgccaagcaaaaggcgtcatttgtaataaatcaaccgcttgtttacctgttaacgccatattataagcaacttgatgctgtgctattagcttgaacccagcaaatatttcatcttttagtggatgaagatgcactgttgaataaatcaacgctttgagttgataaagatggcgtggtgcgggtgtcaccgtaataatatatccatcttgagcaataactcgcgttaattcgccggcattgcaaggggcataaatacgtaccactgcatttaatgacgcatcacaaaaaggcagacgttggctggacgcaacgcaaaactgaataggagcatagcgttttgctgcatatttaatggcaaccttcgccacatctaagccatagacttgtggattttttgactttagttgttgatatatctgataggtataatacccttctccacaaccaatatctaacacctgaggattatctttcggtaaatattcagccactaattgagccactttgtctcgcattggttgataaaagcccgcatctaaaaaatcacgccgagcactaatcatctctgcactatcccccggctctttagaacgtttaaattgtaccgggagtaaattaacatacccctctttagcgcaatcaaattgatggtgattgtcacaaacccaactatgggctttaagagcaagtggctgggagcaaagtggacattgataagacataatatttttacatattccaaaataaaattgggagagataataacatatctcccccaatcatgcggaaaaccttaatgcacagagaccatttcaatgcattgttgacatattgttattcggttagcttcgttttaatttttcggtatttgcaataaataacgcgataacgagcaataaaatggcaccggactgaatcaaagtatctaccgagtctttatgttcaacaataatcagacgcacaatagctgtaatacctatataaataaaataccttaaagggaaatgaccaccggataaaaaatattttacaatcaatgcgataaactcaaaatagaggaagtagatcaaaattccttctaataactgataagaagattcttcagcagctaagttaaataataaagaggcgataacataagtttctttgatcaaaaaactgactaatacgatggctagaataagtaatccgcaattcagcacccattgtaatattgttgcaatacattttaataattcttcgcttgattttctcatagctttataacctaaggttatcatttattgataacaaataatgatagtaaactacctgtcgttaacttggcacaagtttaatagaacaatcttttttccacacctattttttatcttttagggctaaaaaccccaaaataatggcgccataatcgcaatattcatctttaaatttcagcttagccactaaattacctatactactcgagtgaaaaggttaattttttacagaaggtaaattatggctaaaacaatactggtagcaattgacttattagaagatgatagaattcaccgtatggttaaagatattcaatttctagcaagaaaagctgatcactattttcattttgtcacagtcatgcctaatttacgctctcttgaagcttatggacttgattgtgatagcccttcagttatagagaaaaaacatcaagccgttattttgttaactgaaaaactagcacactgtgttcaacaacaattccaattacctaaagagcagtaccaatgccatgcccttatagggacaccaaattataatattctcgaactcgccaataagatggatgtagacactattgtcattggctctagctctcgtaatagacataatatattgcttggctctactgcagattatattgttaacaacaccaattgttctgttttagtgatccgttgataattgacgatacattgttaataaaaaatgctaggattaaaatcaaaaacctttttttaatcccacactaaaatcaaccatcccatttttgattaacatattgatgtatcatttaaaaaataatctttgccctgtattaaaatctttggcattaagatagctacggccaagcgcaccggtacaatggcaaccataaacctcaacatggtgacctattgcttttttcgctctttttaacgccgccagtgaggcacagcgaagatgtagccctccgacaatagcttggatcttgtcatttcccgttatttttttcgcatggcgaataatcgcatcaataccagaatggctacatcctgtaataatcaccagtccttgctgaccttgccaaattagaaaactatcatcaagtacataatcatccgtttcgctactttcactgacaataacgccataacgtttatgtatttgacgctctgtcacttggccagaatagataaatcttttatcgatagctttaggtgtcactgttaactgaaatgaaaactgctgttctagctgctgtcggttaaaaaatggagtaaggcgcttaaatttaatagactggcgccccataaaaagtgctgaataacgtactgaaaataaatcaggatgggcaataatatgtggcttagtaataaagaaatcctcatttaaatgagttaatccaccaaaatgatcatagtgcccatgggaaataacaattgtcgttaatgacgtcaaatcaatcgccatttttttagcattattgataaaagtgagatctttaccagtatcaaataaaattttactttcgctttcagtgtcttctaatagcagtgaaaggccaggataatggctaagagcgggatcgcttgtcttattttctagtagtgccgtaatagtaagcataatttttaattattatcttataggggataatgcatgataattaaaaacagctagagtgccaaattaaaaaagcagttgataagacgccgtcaaccgcttaatggtattgctaataaaataaagagtcggctatcttgctaccatcactgaacgtttcgcataacgggtaatatctgccgctgttgagcctaaatgatagctgtctacttcaggattatgtgagctaacaacaattaaatcagcattaacctgatcggctatctgcaatatgccatcccgtggtttaccaatacagatatgtgtttcaatacgatcttccggtaaatcaaatcgagcaataattttttttaactctttttctgctgatttttttaagcatacttggtcaagttgatcgccattcatcactaagcgataataagaagattgtggcaactttggtaaaacatacaaaaaatggacatagggatcttctcttttggcaatgttctccactaatgtaatggctttatttagtaagttatcttcatcgatatcaatgggaaccaaaatagtcttatacatatcgcctcctattattttttaattgtaggatagtctattttgaaaaaaataccggatatagttaacatatttaagaaatagattaataataatagatatgtataattcacatgcacttaaagtttttgaattaaattatacttagagaaaataaaatttattttaaaataatacattactttaaattttaaattaaaaaataaaataacaaatttatattcaaaatattctgactaatggtttaactcaaattaaagtataaccctatcgaaaaagatagggttatatttatccaatgaccatcaattcaactaaaaaagattaattttttaattgtgctttttgtttacgctttttcacaaaatgataccctattcctaaagcaataaaccaaatgggcgttaccatcagtgcttgacgggtatcatgttcaaatgccaataacacgaccataaacacaaaaaatgctaagcatagccatgacatcactatccctaatggcattttataaatagattgttgatgtaattgaggacgtttcttacgatatgctaaatagcagcataagatcatactccaaataaacataaataataacgcagagaccgttgttactaacgtaaatacccgcatcacatctggaataaaataaattagtacaataccgcaagataaacagagactcgtaaagagtaaaccattggcaggtactgaacgttttgatagctggctaaactgttttggtgcctccccctctttcgataaaccaaatagcatacgactggttgagaagataccactatttgctgaagaggcggctgccgttaataccacaaagttaactaaactggctgcggctggaataccaatcatgacaaagagttctacaaacgggcttttgtctgccaaaatcgaacgccacggcgttactgacataataatcgccaaagccaaaacataaaaagtaataatacgaataggaatagcgttaatcgccttaggtaatgatttctcaggatcacgtgtttcagccgctgctgtacctaccagttcaatccccacaaaggcaaagatagcaatttgaaaaccagcaaaaaatccgctgatccctttagggaacataccgccatcattccagatattttcaatagttgccgtgtggccggctggagattgaaaatttatgctaatcaatacgataccaacaataattaaagagacaatagcggtaattttgatcatcgaaaaccaaaattccatttccccaaataattttactgtggctaaattcaaaataagtagtgtcagcacacaaataaaagacgttccccattcaggaaaattgggcgcccaataactaatataggaggtaatggcaacaatatcggcgataccggtgataacccagcaaaaccaataactccatccaacaaaaaagcctgcccaaggccctaataaatccccggcaaaatcgctaaatgatttatattctaaatttgataataatagctctcccattgctcgcataacaaagaacaggacaaagccgattatcatgtaaacaaaaataatcgatggtccagctagcgaaatggttttcccagaacccataaataaaccagtaccgatagcaccaccaatagcgattaattggatatgacgattggttagcccgcgttgtagagtggcatttttcactctaacgggctgagtaacttctgtttgctcttccatacaatacctgaaatgttttcatatttttgatgttgttacgccacttttttattttttcgccgtggctaagtttgcgaaattattgtgacacaaatctcagaataagtaatgaaaagatcacttttagtaaaatgagtgacgatttgataaccaaataatatcctttcttcattttaatagacgatattttatacatttggaaaaaatttcaaattaagggttgacccgcccttaagagaggagaataattagcgcatcgggttgttagctcagttggtagagcagttgactcttaatcaattggtcgggggttcgagccccccacaacccaccaaatttacgctgagtaatcagtcagataggccacttagtgataagtggcttttttgtttctatcgctaagtgtcgcaaaagtgtctaaacatataatgattatcacgctcattaattgcgttatatagctgactaatatttaacctataaattgtgattaaaaaataagtgtattacaaaatattaaaccaataaaaatattagtatcagtattattgactaataacagcatcaatgaagtttgatgggttaaatatcgctttgattaagcaatcttaatgctattaatatcatgctaaacaaaaccctttaatggttaatatttactgttattttgccaaaaaaataccacctatattcttatatagatggtatttcattaaataaaatcttactgcttattaataattaagtgttacgatattccgcttctgcttcatcaaaacgttgttgattttctgccgttggtgacttacccattaaactgacaataacaatggctatggacgcgaaaataaagcccggaataatttcataaagaccgaaccatttatattgcatccataccagtaccgttaatgcaccaattaacattcccgcaaaagcaccattacgagtcatacgtttccaagtgacagagataaggatcaccggaccaaatgcagcaccaaatcctgcccaagcattactcaccaaatcaagtactttattttctggatcacgggctaaataaatagcgataaccgcaactaataacaccatgccacgaccaacccaaactagctctttttgactggcatttttacgaataaaaggcttatataaatcttcagttaatgcactggcgcagactaataattggcagcttaacgtactcattaccgcagctaaaatcgcagataacaaaataccagctatccacgggttaaaaagtaacgaagctaattccataaagatacgctcatttttagccataaccggacctgcaacggtcggattaacttcaaaataagcaataccaaagaagcccaccgccaccgttccgcctaaacagaggatcatccaagtcataccaatacggcgcgctttacgaatagtttgatttgaatctgcagccataaaacgcgcgagaatatgaggctgtccaaaataacctaatccccaagctaataatgaaacaatagcaataaaatcaagccctttaaacatatcaagataagccggatctttcgctttaatgatctctatagaggtgtcaattccaccaattgagaaaataacaataattggtgtcagaataagtgcgaaaatcattaatgtggcttgtaccgtatccgtccaacttaccgccaaaaaaccacctaggaaagtatatgcaatggttgctagtgcaccataaatcatcgcttcatgataaggaatgccaaaggtagactcaaaaagcatacctcctgcgacgacacctgatgcacaataaatagtgaagaaaataagaataactaacgcagaaataatgcgtagcattttgcttttgtcatcaaagcgagaagttaaatagtctggtagagtcagtgcattattgtttttttctgtttgtaaacgtaatcgccctgcaactaaacgccagttaagccatgcacctaaacataaaccaatggctatccaactttcggagatccccgcaaaaaaaaccacacctggtaatcccattaatagccagccactcatatcagaagcgcccgcagaaagtgccgttactacactaccaagccttcggccccctaaaatataatcatcaaaattttttgttgatcgatacgctagatagccgataaaaagcatccccaatatatagatcgtaaaggtaattagcattggcgaatttagagccataatcgcagttctccatatatctgttacgatcaattgctatgctttcaacttatgcaggaacgttgcacttcgttgcacaccaatgaccttatcagtttttatttaaaataatttcttactgtaacaaataaaacattcatatcaatcctagaataggttataagcatttaacaagaaattaacgtatcggtgtttaatttttgtatgtaacttcacactatttgcttcggttgaaagagattaatattatcttcccattgaagaaaaatatataagccaatgaattataagtattatttatctatctaagatagtattttttaaccatttataaaacctgacaactttcacattatttataaatttattgttaacaatgttgcacaaagttgcaacatgactgatattaagaaaaataactggtcaatgtgccgtataagtaagatgcacgatatgaggagcactgcatgagtagcacaacaatgggtgttagacttgatgaagaaacccgtaatagattaaaagatgctgcacaaaaattagatagaacatctcattggctaattaaacaagccatcttcaattatcttgaacaaattgaaaatgatcagctcaccctaacccctattacacaggctgagcaagatattgaagaaagcactgatcccctaacggcacattatcaaccgtttttagaatttgcagagcagatccacccacaatcggtgttacgctcggcaattacttctgcttatcgtatacctgaaacacaagcagtgcctatgctactacagcaggcaacgctacctgagcatgaggctcaagccacgcataaactggcttactccattgcagaaaaattacgcaaacaaaaacagggtgttggacgctcaggtctggtacaaggcttactgcaagagttttctctctcttcccaagagggggttgccttaatgtgtttagccgaagctttattgcgtattcctgataaagcaacccgtgatgccctgatccgagataaaattagccatggcaattggcgctcgcatttagggcaaagccaatctatgtttgtcaatgccgccacttggggtctactgtttacaggcaaactcgtctctacccataacgaagagaaattatctaattctctaaatcgcattttaactaaaagtggtgaacctttagtgcgtaaaggcgttgatatggcgatgcggttaatgggggaacaatttgtcaccggtgaaactatctcccaagcgttagccaatgcacgcaaacttgaagaaaaaggctttagatattcctatgatatgctaggagaagcggccctaacggaaaaagatgcgcaagactatttagtctcttatcaacaagccatccatgccattggtaaagcctctaatggacgaggtatttatgaaggaccggggatctccattaaactttcagcattacatccccgttatagtcgagctcaatatgatagagtgatgtcggagctttaccctcgcctactctctttaacgctacaagccaagcaatatgatattggtattaatattgatgcagaagaagcggatagactggaaatatccctcgatttattagaaaaactctgcttcgagcctgaattagcgggttggaatggtataggatttgttattcaagcctatcagaaacgctgccctttagtgattgattatattattgatttagctcgccgcagtcgtcgccgtttaatgatccgtttagtaaaaggggcttattgggatagtgagattaaacgcgcgcaaatggatggactggaagattatcctgtttatacccgtaaagtatataccgatgtctcttaccttgcgtgtgcgaaaaaactgcttgcttcaccgaattatatttatccgcaatttgccacgcataatgcccatactttatcagccatttatcatctagcgggtcaaaattactatcctggtcaatatgaattccaatgcttacacggtatgggtgaacccctctatgcacaagttgtgggtaaaattgctgatggtaaacttggtcgcccttgtcgtatctatgcgccagtaggtactcatgaaaccctactggcttaccttgtgcgtcgattattagaaaatggtgcaaatacctcgtttgtaaatcgtatcgctgacaccaccatctccttagatgaattagttgccgatccggttaaagagatcaataaaattgcgcaagctgaaggacaaatcggactttcacatcctaaaatcccgctcccaatgcagctttatggtgatgaacgcaaaaattcaccggggattgatatgtctaatgagcatcgtttagcctcattatccagtgcattactgacctctgcgatggaaaaaattcacagtcatcctctccttggtggtgagtgtaatagtgcagaagaagtgattgcaccacaatctatactcaatccggcaaatcacaccgatgtcgtcggtacagtacgtgaaacaacggccgccgaagctaattttgctttagatattgcccaagaaaatggtgaaatttggtttgcaaccccacctgcggaaagagcggcgtttttagtccgcacagcagaactgatggaacagcaaatgggtccattaatgggtgtcttagtcagagaagcgggcaaaacctatagtaatgctattgcagaagtgcgtgaggcgattgattttctttattattactcagcacaagtggcaaatgattttgataataatacccatcgtcctttaggccctgttgtctgtattagtccttggaacttcccattagccatctttagtggacaaattgcagcagcgttagcggcaggtaataccgtactggccaaacctgcggagcaaacccctctgattgcttttaaagccgtagaactattttatcaagcaggagtacctcgcagtgcattacaactcttaccgggtcaaggggagaccattggtgcacaattagtggcagatgaacgcgtgcgtggtgtgatgtttacaggctctaccgaagttgcccacattctgcaaaaaaccttagcgggtagactcgatagcgaaggtcgccctgttcctttaattgctgaaacaggtggcttaaacgccatgattgtcgactcttctgccttaacggaacaagtggtcactgacgttatggcctctgcttatgatagtgcgggtcaacgttgttctgctttgcgtattctctgtattcaagaagaggtggctgatagcacgattgaaatgttaaaaggcgcaatggcacaagccataataggtgatccaagtctcttatcaacagatattggccctgtaattgataaagaggcaaaagcgggtattgaaaaacatattcaaactatgcgcacagcgggttttgacgtttatcaagcaacctataatcaacttactaaacaggctgaaaataacagtacttttgttcctcctaccttaattgagttagataaaattagctcacttaaaaaagagatttttggccctgtactgcacgtcgtacgttactcaagccaagatctgcctgctttattagctgaaattaatgcgactggatatggattaacaatgggggttcatacccgtattgatgaaactatcgcttatgtagcgactcatgcaaaagtaggaaatttatatgtaaaccgcaatatggtaggtgctgttgtcggggtacaaccttttggtggtgaaggtttatcgggcacggggccaaaagctggaggccctgcttatctgtatcgtttattatcaaaacgtcctgaaaatgccataacacaaaccttagcacgtcaagatgaaacattaccccttgatgcctctatgcgacaaaagttattacaaacctatcatcactatatgacgtggttagcaaataaaacggaacctgcacattatcaggcgctagaagaatacgccaatgcatcacaagccggaacattgcgcgtattgccggggcctactggcgagcgtaatacctatcaattagtcccttgtggcaaggtgctttgtctctcagataatgagcaagatatatttactcagttagcgggagtctttgcatcaggatgccatgctattgtccataatgctgttttctcgcaaaaaacctatcgtgaattgcctgatatgatcagaaaagcaatcactctcacggacaactggcaagatgagtcactaagcattaatgccgttatttatcatggtgatagtgatcagttaaaagagacttgtcagcaaattgcacaacgtaaaggggctattatttcagtacaaggcttctcacgtggtgagacagcattgttattagagcgtttattgcatgaacgagcattaagcgtcaataccgccgctgccggaggcaatgccagcttaatgacaatcagttaaacccagcgttctctttctcactttatttttgagaccacctttaacttacttatctattaaaggtggtttttttatttctggaataaaaaataaaaaggagcaacataatgttacccctttttttaggtctctcttgaatgcgattagtgaccactactcatcgaggttggcgcttggcaccaatcaagatattgctcatacttacgtagggcaatgttgtagttactaaatgcggagggagtgagctttttactcaagtctgactgaattttctctgtcgtgaattcttgacgaggaaaattagtggaagtcagcaattcatcgagtcgacgtaaacgaaccacatactcacgaacagtactgtggctcatctccgtttgttcgaacaaatactgcttaaaagacataatgtcaaagtaatcagtttcactattacagtaaatctcactacaaaaacggcacagcgcagaaaactttccttgcaaggtttcccatgtttcatcatcaattaaatctgtcatttcagaaatggcttctttattgataacttggcgattgaatacgagagaaatccgatcaagcgccttatggcaatgcaaacaatgagtttggctgtgtttatagtctttaatgtaacggcttagcggccgtttcttttgtgttgaaacagacataagagataaagccctgtgttgtagtcttaataaataaaaacaaaaataagcaaaacttctatttctctgggtttaagcgtgctcgcagccttttgattgcttggctgtgtagctgacttacgcgggattccccgacattaagcactgcgcctatttctttcaaattaagttcttcctgataatacagggtaagaaccattttttccctttcgggaagcaattctatcgcgtctatgactctttggcgaatatcactttccaataacatttgtaaaggattgtcatcgtgatcttcgtcttgagacggttcacagctttcaccgtaaatttcatgccattcgtcataagagaacaactggctgttatttgtatccaataggatctgccggtattctgctaactcaatctgcaaatgatcagcaacttcctgttctgatggtggtcgtcctagatcctgctctaactgatgaatggattgtgtcacttctcttgcattacggcgcacactacggggcgcccaatcacgacttcgtagctcatctaacatagagcctcgaatacgttgcacagcataagtagtaaaggcggcaccttgcattgagtcataacgctcaacagcattcagtaggccaatcccccctgcttgcaaaagatcatccaattcaacactcgcaggtaacttgacctgtaatcgtaatgcttcatggcgaaccaaagggacatatcgctcccagaggctatttttgtccatcacgccttcggcggtatacaaatcactcacaacaaaagacacctttggataaaagaccggaaaccattatccgacgaaatagtgttagcaatcggctgaacagtgaagcaaaagcccctctttttcacctatgctaaattttcagcgaaaattgggttttcattgataatttaatttgttattgcattacaagtacatactgtaccttaagatgggtcatactaatccgcagaaaaaccgttaaataaattgatattttgtcttattgaaagaaatgtattcatcaaatctgtattttgttgataaaaaaataacatataaatcatattacttatcttttatctatttttacctacaacccatcaatgggaatacctatccatgattaataaaaaaaacaattgttttgatgaaaaaacacccacagcaaaaatggctgtgggtgggatctgaagatgagtttaatgaaggattaacgtaacagagacagaacagtttgtggtacttggtttgcttgagccagtacagcagtacctgcttgttgcaagatttgatttttactcatattggacacttctgtcgcatagtcagcatctaagatacggctacgtgaagcagataagttattaacagtgttatttaagttattgatagtagattggaaacggttttgaatcgcacctaatttagagcggctttcatcaaccttactaattgcgttatctaaagttgctaaagcgtcatccttaacatttaaaactttaacatctttacctgcatctgccttaaatttaatggttttactaccagtgaactcaatttcaccagtagtagtacctgattttaatgtaaagtctgatttacttactacgtactcgtcgctaccatcctttaagacaactttattagcagaaaccttaccatctactttatactcttttactgaaacaccagtcgcgtattttgtaccgcccgaaatgcccagagcgtttgcatcgatagcatcacctgttgctttaaccccttttttctctgttttagcatcaaacaggttatcactagcaacacctaatgtgtcgttatcaattttatctaaattgaattcaatcacttcattgtcattagtaccgacttgaatggtcatttttgacttttcaccactcagtactttcacaccgttaaactgagtttgttctgaaacacgattgatttcatctaaacgttgattaacttcattttggatagaagtgatatctgagttagagttagtcccgtttttcgcttgaacagttaattcacgaatacgttgtaagttattgttgatttcgttcaatgcaccttcagtggtttgagacactgaaataccatcattcgcattacgagatgcttgagttaaaccgttaatatttgaagtgaaacggttagcaatagcttgacctgccgcatcgtctttcgcgctgttaatacgcatacctgaagataaacgttcaattgcattaccaagtgcgctttgtgaacgatttagattattttgagtgactaaagacagataattagtattaataacttgtgccatacaatattccttcaattttatttgaaaatttttaattaataggtttgttattacactcctgtaataacgttgcctaaacactatcgtcattaaatcgaaggtatttatgtgttttcgcgtcgcgaaaatagtaaaaaaagccaattaattaatttataagagataatgactagcagaaaaaacaaaaatagatggagagaaaaaaataaactaaaacagagtgagtttaaatataaaataaaatgacaaaaaagaccctcagatgagggcctttgatatagaaaggtatcttttgtgtcagggtacgaattaacgtaacagagacagaacagtttgtggtacttggtttgcttgagcaagtactgaagtacccgcttgttgcaagatttgaccacggctcatgttagaaacttctgttgcatagtcagcatctaagatacggctacgtgaagcagataagttgttaacagtgttgttcaggttgttgatagtagattcaaaacggttttgaatcgcacctaatttagaacggctttcatcaatggtgttgatagctttgtctaaagttgctaaagcgtcatctttaacgtttaaagttttaacgtctttacctgcatctgctgtaaattcagttgttttagcaccagtaaatttagctttgtcagcaccttccagtgcgaaatcgcttttatttacgaggtaatctttagtaccatcattgaaaattactttatcagcagaaacaacaccatctactttatattcttttactgtacctgaatcgtatgaagttgcaccagcaacgccgatatctttcgcatcgattgcagcacctgcttctgtaacaccttttttctctgttttagcatcaaacagtttatcgctagcaacacctaatgtatcgttatcaactttatctaagttaaatttgatagtttcattatcgttagtaccaacttggataaccatttctgatttctcaccgctcagtactttcacgccgttaaactgagtttgttcagaaatacggttgatttcgtctaaacgttctttcacttcgttttggatagaagtgatatctgaattagagttagtaccgtttttcgcttgaacagttaactcacggatacgttgtaagttattgttgatttcgtttaatgcaccttcagttgtttgagcgatagagataccatcgttcgcattacgtgaagcttgagttaaaccatttacgtttgaagtgaaacggttagcaattgcttgacccgctgcatcgtcttttgcactgttgatacgtagaccagaagacagacgctcgattgcacttcctaaagttccctgagatttgttcaggttgttttgagttaccagggatagatagttggtattaatgacttgtgccatagctagattcctttaaaatcaagtcgataaaataaaagtttgcctattcatttacggtgtcaatcaccggcaacaagtttatcggcaccccagatacaacctttaacttttccaacaaatttttctgtgattttttatagaatcgccattaactaaatgatatataaagaaattaatttattatttttttatattatttttatcaattctcgtcataaaccttttttcttatgcaaaattcgactttagtattcaatgacaataaaaggcttctatatggcggtctgtttccctcatcaaaaatagtaaatagacgtaaacttttcgccaattcttccgataacgctgtgtagggattattttacgaacacagaaaggagaccagtatggctggtattagtgcactaggaataggcgccaagatgccacttggcgagacattaatgcaattagaggctgcggaaaataagcgccttgaacctttagacaaacagatgaaaagctacgatgcacaaattactgcatatggaaaaattcgtagccaattagataaattacagaaagcatctgaagaattaaaaaaattcgataaaatcgtcgccaccaaagttgatgatgagtttgatgcttttaaagtaaccactgatggtaaagcaagcattggtaattatacggtctcggtaacagagcttgcccatgctcaaacactgaaatcaaaagccgtcagtgatatcaaagatcctattggtgaaacattaggtgaaggcaaaacacggactttagtgatcacccaaaaaggtgaaaaagagcctttaaaaatagagttaacagatagtcaaacttctattattgaattacgtgatgctatcaataaaaaagaaggcaacgtttctgccactattgtaaaagcccaagatggcgttaaccatttagttctgacttctcgtaaagaaggtacagattctcaaatggaaatcactgttgaaggtgatagtaagcttaacgattttattagctactccactaaaacaaacagtggtgcaatgacagagatcgttaaggcaaataatgcaaagttaacgattaatgggattgaaattgaacgtcaaactaatgaaattaaagatgcgcctgaagggatcacgttaaatcttaagaaaaaaaccaatgataataaagatggcgtagataagcctgaaattattacggttgcgcgtgatattgagccaatgaaaaaggccataaaagcctggaccgatgcttataatgaattaaataaaacctataaagatttcaccaagtacacccaagttgaaaaaggtgaagatgcctctaaagacaatggtgtgttattaggtgataccactagccggatgattatgtctgagctaaaaagctttatcactcgttctcaatcttcatctgagattgatacccttaataaaatgggcattaaatttaaagtagatggcacattagaagttgatgataaaaaactcgataaagcattaaaagaaaaacctgctaacgtcaaagagttttttatgggtgatggtaaagaaacaggatttggtactcaaacctataattacctgaaaaaaacgctgcaatccaacgacggcacccttgatattgccactgatggtgttaaaaaacgtaaaaaatcgttagataaccaaattaaaaataccaaacgtactattgaagcgacgatggaacgttataaaaaacagtttcaattattagataaaatggttaatgccatgactaactcaagtgcatcaattgaacgtttattacgctaatttttaagtaggatattaggatattatgtatcaacaatcagccagtaaaatgtatgctcaaatcgatgttgaaagtgagattttaaatgcttcaccttaccagctgatccaaatcctatttaatggggcgctaagcgcccttcgccgtgcattaatattaatggaacaaggaaatatcgccggtaaaggagaaaatatttctaaagctattaacattattggcaacggcttaaaacaggggctggataaagaaaaaggggaggagcttgctgaaaatttagcattactttacgactatatgatcactcaactactcgatgccaatttaaaaaataatccagaaaaaattcatgaagtcatcaagttattaactgaaatttctgatgcttggcaacaaattggcacacagattaattcttattaaaaagcgtggacagcaaatatggatataatggcagcttacgagcaggttttgaaattaagtgagcaaatgttaacgcttgccaaaaatcagcagtgggatcagctgatagaaatggaaatggattatttaaagagtgtagaaattatcactaagatgataaaacccactgagggtgagctgataatacaacagcagctcaccaatatgttaaagaaaatactcgaaaatgaaaatgagacgcgaaatttattacgagcaagattagataagctcgctgttttaataagacagactgaacaagagcagagggtacaaaatagctatggtcagttttcagagcatagttattatcctgatctcaatctaaaataactttcctctgcgccaaaagcggttttattagctaatggcgtctttatttaccgagttatttcttgttatacgatattatttgttatcggtaacgttgtgacaattaaacgatatgatataaaaataacataataaaaactgaatttattacactatatcattcgactatcgctatcatcatctgctcttccccatctatttgttcttcatttactgatatcatcaccgataaataaaaatcgcctacacatggcaggcgataaacttactgtttcaaatagataataattgctttatttaatcacatcgtagagttgaggatctgcaaaatagtctgcggttaatgccatagaaggctcatattgtgccccatatatatcagagaatgctttcccctctttacctaatgaaactttacgttcatcatcaccgctactttcatatatggaataagttttacggcgcatagcaatatatttatctgcatcatttttaatatcagtatgatgctcaaatatctccttatcagttaattctagcttgttcgctaattgacatccccaacgtgttaaacatctttctgcaaaatgtcgcacaattaaccccggtgaaaatagtgcatttttaccttcactaccatcaatagcagcattgcctactaaagtcgcatggcgtcctgaaagcgggaaaatatgcattttcgtctcagcagtcacggttggaataacgcaagcaaatccttttgagcgttcatcaatggcataaaatccgacatattccttaacattgctacctagtgtcaccttttctggttggaaattaagtggccctgggacgggatcaatagcaaaaatattgaccggaatatcttttaataggggatcttttaacatggcattggcaagcatatgacaggtgatgccaccacggctccaacccattaaattcacttgggtgggaatgatgccatctttgcgaaaggtacgaataatttgttgctgaagttgttgttgagtgacatagcggtcaccataattatatttacgccataaaaaagagccagtcacttcaacatcttcaatgggaatacccgcttttttcagttgattatattgttgttctgttaacttttcacgttgccagtcaaagttgcctttcattaagcacagtgcatgttcaacattttcttcccatccactgccaaataaagagccttttatatctgaataattagggctttcaacccataaatcatcttcttgcaaattaccgctacctgggccatctacaataaaccactgagcaaattcgcgatctagattattatgcgccaaggtggaaacaagctcaccttgccaataaacaggattattatgattattattatcaaaagatgaagcgccggtaccacataaataaacggttaatactgtcataattaaaaattccttgtatgttttactaaaaaatcaaaatatgatctctgtttccttgtatcgagctattccttagctcaagtaaactttaacgacgacactttttttattcaaatataaaaaagtcattatcacagttcagatcacataattaataactatttaagttaagtcgtatattaattgctgtatagccatcttaattaaactaatgctattcattatctgcttttttagcgaaaaaattattttgattataaaaataatatcgaatatttcacgaagttaagagactaaatcttaatagatttatgatttattgtgatagtgaattgggatagtgaagagagtggttaaaaataaatcattaacgaagtgtttatttttcttcttaccgttgaagttgagataaaaacaaaaaaatctcgctaatgatcttaacgagatttttatcaattgatacgcttataaacgattaaatgccacaactctcaccgcaggaatatcagcttgagccccttgtgcaacttcctgacatgctttttctaacgcaatatggggtgtgatcccactctcagtttctactattttatgcccggcgtaggtatcaccatttctggaacgcactttatacgcaataaaccaatattccatatcatcaccgtttacgttattaatcataaaattaccataacggtttatgactgacgttaatgtgataataatcaataattttcagttttttcgtatcaggttgataaaaatgataacagcgtacagatttagcgattagcgtccatttcagtttgtatcatcttcttaatttttgtggctttttcaaaatgatctaatttatgcgtcattatccaccaagttgccgcttccattaataattcaggatcatcatttttattagcaaaaaaagcataaaaagagaggcctaccccttctcccttttgcgctatttttgtatcacatacttggatgattttttgctgcaacattctgcgcatcgtttgtgtcactcagtgcgttgttagttagtacagcttacatgggaaatgttgtcttgtgaatacgaaaatgacggaaaggattttattaaaaatgagtgttttaaagttgattaatttaattatatttatataaaaatataaaacaatctaaataagagtatctaattacaaatcttatttaattaatataaaatccacatttaccaatcgggattaaaacactatttttaattatttcttttagagaatatcgggtagtaaaataaactcactttaagaaagtctaaattagatatattaaagaatatatttatttaacattaaataaatgaataaaaggtgtattatataatattgttttgttatttatcctctaaaaaagaataaaggaataatgatatgaaaaaagtattactcagtcttgctatgctgagtgtaatatcaacgccggtattggctaaaacgcctgttgctaacttaaaaatcaatggtgatattaagccaccaacttgtactgttcatggggcgacacaaagtgatgttatttttgattacggagtcataagcccaacacttatccctcaatcgaaaaactacgagtatcctttagctacaggtaaaaataccgttacggttgaatgtgatgctaaaacatatttaacctttgttgcatctgatacttatgacagtgcggaattagctaatgatacgacaggacaatttcatttagttgataaagcaaatcctgaagccgctgttggtgcagctttttttatatggacaaatattactgtcgatggtaagcctgcgtatatttcacgagcaaatgatgttgctattacggggaataaatttaataacgtcctatacaaaggccctaccaatggttggacctcagaacaacaatcagatattaataaaaactctctgtctctcatttcaggtgaaattttccaagcgaatttcagtcaaggaaagacaagtcgtacttttattttatccaaagatgcactaagtaaaaaaggaatagatattgctgatggattagattttgtcggagaggttgttctcacttttaactttggggtctaattttaacatattgataatcacattataattaacctttatattgtgattatcttttacgttaaaaaataaagaggcctaatttatataattaatcaattatcaatttctgctgcgctattgatgcccttattttcttcctcttctttttgtctgggttcctctttcaccttctgtgcttgtagtagcataagtaaattggtcccccattcagaggtaatattatcacttcatcaacagatgggggacccatcagcaaaaatggtacaggataatatgatgcttagatgcatgaatacgagcaaaaccaaatattgctattaagccaaacattgaatgctcctatcccctatatgtccccatcaagccacaacaaagataatattcttttatctcaatgagttaattttatcacacctgcattgacataatctcttgataagcggcgaccagcttattacgcacttgtacgcccatttgtaatgagatgctggatttttgcatatccaccatcacatcatttaattcaacaccgggcgtacctaacgtaaatgcttgtactttgttggttgcattaacacgagtttcgttaattttacctactgcttgaaccaactgagttgcaaatcctgcctgtactggctggggtttggcaatattggatgcttgtaaagtttgaatttgcattttatccagaacactttcaatagctggaattgacatataaacctctgcgttaatcatctaattcaatttttgaatcaatgtcatagtaagtaggtgaaccaacacgcttaccgagtaataccctaacacaggggcttcattccaaagcgagtaattaacgcaaaagttaaaggctaattacgccattaaatgaaacgcaaaaggccaataatgagacacctgagagtaggtttatttatttgcgtaaggggagtctgttttgttacgccacgcttttagtattcatcccgaactacaaggcaaggattgtctatgaatgccgaaaaaaccgacgttgtgaaccagaaaaaaggttttaacgccattattaaccggataaaagccgatccgaaaattccgcttattattgcgggatcggcggcgattgccatttttgttgctgcttttttatggctacaaagccctgattataaagtgctttatagtaatcttagcgataaagatggtggcgaaattgtcacacagttaacacaaatgaatgtaccctatcgcctatcacaaaatggttctgcgattatggtacctgacaatcaggttcatgaattacgcctgaaactcgcacaagcggggcttccaaaaggtggagctgccggttttgaactacttgataaagaaaagtttgggatcagccagttcagtgaacagattaactatcaacgtgcacttgaaggggagcttgctcgtaccatcgaaaccttaggtccagtgcaaaatgctcgtgttcatttagcattacctaaaccctctctttttgttcgtgagcaaaaatcaccttctgcttctgtaacagtaggtctgctgcaaggtagagccttggacgaaggtcaaattaatgccatcgtacatattgtagcaagtagtgttgcaggtatgcccgatagtaatgtgaccattgttgatcaaagcggtaagttattaacacagcccgatgctttaggtcgtgatcttaattctattcaactcaaatatgtccaagagttggaaagtcgctaccagcaacgtattgaaacactattaggccctattgttgggcgtggtaatgttcatgcgcaggtcaccgctcaagttgatttttctcatacagaagaaaccgctgaagagtacaagcctaatcagccccctaaccaagctgcagtacgctcaaaacaagtgagccaaagtgagcaaaatggaggcatgttagctggcggtgtgcccggtgcgttatctaatcaacctgttgcaccaccgcaagcgccgattgaaaaagccaaagacacgacggctgatgagaaaacaacatctaccaatgctaatcgttcaatgacacgtaatccaaacagcaatagccgtttagatgaaacaaccaactatgaagtagatcgtcgtattcgtcatgttaaacgacctgttggcaatattgagcgcctttctgttgcggtaatcgtcaattacaaaaccgtagaagacaagaaaaaagcaacagaaggtgaagagcctattgtcgaaaataaacaagttccgttaaccgatgaacagcttcaacaaattgaaagtttagtacgtgaagcgatgggttattcccaagagcgtggtgactctttaagtgtggttaattctcaatttaacgataccgaagagccagtgattagcgttcctgtgtgggaaaatccacaaatattggctaaagcattagatttaggccgctggttattgcttgttatcatcgcgtggatcttatggcgtaaattagtgaaacctcaacttgaaaaacgccgtgaagcagaagtcgccgcacaaaaagcgattttgaaaaccaagcttgaagtgacagatgatgtcaacgaagccgaattagatgaagaatcaagacgtaaacaagcacgtcaacgtgttagtgccgaattacaaagccaacgtattcgagagatggcagaaaaagatcctcgtgttgtagccatggtaattcgtcaatggatgagtaaagaacaatgagtaatgacttaactggaaccgaaaaaagcgccgttatgttactgacattgggtgaagatcgcgcagcagaagtatttaaacatctaacgacacgtgaagtgcaacaactgagtattgcgatgtcttctatgcgtcagatctccaatcaacaactcattgatgtgatggcaagcttcgaagaagatgctgttcagtatgcagcattaaatgtgaatgctaatgattatttacgctctgtacttgttaaagccttaggtgaagagcgtgctaataatctgctcgatgagatctcagaaacccgtgaaaccacaacaggtattgagacacttaactttatggagccacaaatggctgccgatattatccgtgatgaacatccacagattatcgccaccattttagttcacttaaaacgtggtcaagccgctgatattcttgctctgtttgatgagaaattacgtaatgacgttatgttacgtatcgcaacatttggtggtgttcagccatcagccttagctgaattaacggaagtactgaacaatttacttgatggtcaaaatctcaaacgtagcaaaatgggtggtgttcgtactgcagctgaaattatcaacttgatgaaaagtcagcaagaagaaaatgttatcaccgcagtacgcgactacgacggcgaattggcacagaaaattatcgacgaaatgttcctgttcgaaaaccttatcgatatcgacaaccgttcaattcagcgcattctacaggaagtggaatccgaatccttggttgtggcattaaaaggttgcgatcaagaactacgcgatcatttcctcaacaatatgtcgcagcgtgctgctgaaattatgcgtgatgacttggcgtctcgtggacctgttcgcatgtctcaagtggaagctgagcaaaaagcaattctgcttattgtacgtcgcttagctgagagcggtgaagttgttcttcatggaggagacgatacctatgtctgataaaaatactgatacaaactggaagccttgggttccaaaagaacttattgactgggaattaaaagtcaaggaagacacggggttagacgagaaggaagacgaaaatcaagaaaaagaagtcgttcagcaacagaaagtcctcgagcaaattaatatgcttgatgacatgaaagaaaaggcccaaaaactgggccatgctgaaggctttgaggcagggaaaaaccagggttatcaggaaggctatcaggcaggattacaatcgggtatcgaagaaggtatccgtcaaggcattgctaaacaagaaccttttattaatgaatggcaaggcttattagctgaatttagacattcattaaatggtttagatagtgttattgcctcacgattaatgcagatagcactcacagcggccaaagaagtacttggacaacctgcggtctgtgatggctctgcattacttgctcaaattacactgatgttgcaacaagagcagatgtttgcaggggatccgcagctacggattaaccctaaacatatccctctgattgaaaaggaattaggcgattctcttaccgcccacggttggaaagtggtggctgataatagtatccatgtagggggctgccgtgttgtaaccaatgatggtgatcttgattccacaattgcgacacgttggcatgaattgtgtcgtcttgctgcaccggaggcgttgtaatgaccgcaagattggggcgttggttagaaaaactcgctgatgcagaatctcgtttaaataaaattccgcgcattcgccaatatggtcgcttaacccgtgctacaggcttagtcatggaagctaaggggctagttatgccccttggctctacctgcttaatagaacgtaccattggtaaaacggttgaagaagttgaaagtgaagtcgtcggatttaacggtagccaaatgttactcatgccactacaagaagtggaaggattaaccccaggtgctcgagtctacgctcaatcgatccccggtcgtgaaggcgaaggccgacaattaccccttggtgatgccttattaggccgcgtacttgatggctcaggtgatccgctagatggtttaccgccgccagataccagttatcgtgcaccactgattacaccacctatcaacccattacaacgtacccccattacagatgtacttgatgtgggtgtacgtgccatcaatgcactgcttacggtcggtcgtggccaacgtatgggactctttgccggctcgggtgtcgggaaaagtgttctattaggtatgatggcgcgttttactcaagccgacgtcattgtcgtagggcttattggtgaacgtggtcgtgaagttaaagactttattgagaatatcctaggtaaagaaggattagcacgctcggtggtagtagcagcacctgctgatgtttcaccactcttacgaatgcaaggtgcttcttatgcaacccgtattgccgaagattttcgtgatcgcggtaaacatgttttattaattatggattcgttaactcgctatagcatggcgcagcgtgaaattgccttagccgttggtgaaccgccggcgacaaaaggttatcccccttctgtatttgcaaaattacccgcacttgttgagcgtgccggtaatggcgttgatggtggtggctccattactgctttctataccgtgttaacagaaggtgacgatcagcaagatccaatcgctgattctgcccgtgctattttggatggccatatcgtgctttcgcgttcactggcggaatcgggtcactaccctgctattgatattgaagcgtccattagccgtgcgatgacctcactgattgataaaacacattatcgccgagtacaagtatttaagcagctattatccagttatcagcgcaatcgcgacttaattaatgtaggggcttatgccacaggcagtgatcctatgctggataaggcgattgccctttatccatcattagcaaaattcttacaacaagatattcaagagcaatgtagctatcaacatgcttgtgaacaacttaatcaactgatcacactagattcattctgaacataatcaggaaaaataaagagggttccaatgcgggagcagtcacctttagtgacactgagggaactggcacagacagcggcagaacaagccgctgtccaactagcccaagtccgccagagtcatcaacagatggaacagcaactcaatatgttgatcgggtatcaggatgaataccgtgttcgtctcaaccagacgttaaatgtgggaggcatgtcatcagcatcatggcaaaactatcaacaatttctcaaaacacttgaattaactatcgagcaacataaacagcaacttcgtcattggcaagcgcaactcgaccttgcaacggaacattggcgagaaaaacagcaacgactcaatgcgtttgagacattggagcaacgcgctgaagatagccgtaagcgacaacttgatcgtattgagcagaaacaaatggatgagtacgcacagcgtagtactttacggagaacaacttgatggagataacgcttctgaccatggatgtcacagcaacctctccgggaacgacatccgctacaacaagtcaacccggtgataatgcgtcgacatttgcacaacttctgagtactcaacctcagaatacacccagtgataaaaaaaacgcctctatttcaggccattcctcaaaagagaataaggcgcacaatcacactgaaaaaaataaagaccaacaaaatgatgacgatattgatactattgtcactgaatatgcggcattagaggcgccagcaacgaaaaatacccatcttgccctctcgttacctgataatgagcaatttagctcaattcttgaaaataaaacggcctcttcattaatgtccgcagaagaattagcggcagagcttccagtacaacttgccggacttgcagggttaaaatctacatcgctttcagccaaccaagctcatcagccacatttattgggaacctcgttaaagcatgctgggaatggaaacgagttatctcaccttatggcagaaaatgcccgtgctgaacgtgatcttgtcgataaatggcaacaattcaatacgcaagctaatgcagatgacaaatcattacttgctcaattacgccctgagacagcgtcattaacccaacttgcaacacatgaagctcgccatttaacgaatgggcattcagcaaagaaagttgataacgcttcactgttatcttccgtggcagaaaaagcggatggattgttagccgatgacaaagcatcagccaatacaaaattagccgataatctggcaaaccaaataatcggtaataaccgtattgctgaacgcgatctacacaatagattatcgacctcttcggtgtttgcctcttcatcagtagcaagtcatgcgcaaccgtcatcaatgatgcaagcgcaaatgcactttccttcgatgcctaccccgatgttaaatgcacaaataggcacaccggaatggcaacagcaactcaatcagcaaattgtgatgtttagtcgtaatggtttacaaaaagctgagctacgtttacatcccgaagagttgggttcattacatattcgcatgaaaattgaagatggacaggctcaattacatcttgcctctcaaaatggacaagtgcgtactgtgttagaaaattccctgcatcatttgcgtcaagcgctctctgaaaatgggatacaactcacacaaagtcaagtgtctagcgacagtcatgacggttggcaacaacaaaatatgtcagattcctctcaatttagtggaaatggtgccgataatcatcaaagaagcgagggtaattctatgcaattagcctcagaaacggcacaaaagataacccttacgcctcaagagttagcctctgctcgtggtggtgtcgatatttttgcctaatacaaatgtattgggaggacacactatgtcaataaacgtaagagttaatggttttttccctatctgtttctgccattaaaaaacagaaatagcgggataattaaggttgatttagatggatatggaagtccacaaaagtgaacacgtatccactacaaaacaggaatttaactgtccatgtctaattacagcaatgaacgtaaaagctatagcttaattctgatcatcctattattggtgatcgccattattgcagcggcattcggtggatatagttggtgggcattgaagcatgctaaatcaggtactacgggcactagtcagcaaaaagttataccggcccccgtttttatgtcattagagccttttaccatcaatctgattgatgaagaagaacatttagatcgcgtactctacatagggatcacgttacgcttacatgatgagaatacacgtaagcgcttacatgattatttacccgaagttcgtagtcgcttgctactacttctttctcgtcaacacgctaataaaattgcaacagatgcggggaaacaacaactcatgacagaaataaaagaaacgctgagaccgactcttgtaccgggtgaatctgaacagatcctctccgatgtactgtttaccacgtttattctgcgataatcattatgagcgataatatcctttcacaggcagagatagatgctctgctgaatgatgacacatcaggtgacgacgcccaaaaaagcgcgaacagggaacctgcgatagcgaaggatccgaatgaaccggatattcagccttatgacccgaacacgcaacgtcgtgtcgttcgagaacggttacagtcgttagaaattattaacgaacgttttgcgcgtcaattccgtatggggctgtttaatatgcttcgccgaagccctgatatcacggttggtggcataaaaattcatccttatcatgactttgcccgtaacctacctgtaccaactaatctaaatttggtgcatttaaaaccgttacgcggcacagcgttatttacctttgagccgaatctggtttatatcgcggttgataacctgtttggtggcgatgggcgttttccaattcccgttgaaggacgcgagttcaccaatacagagcagcgtattatcaacaaaatgttaaaactggcacttgatgcctatcgtgatgcttgggactccatcttcaaaattcaagttgaatatgttcgttctgagatgcaggtaaaatttaccaatatcacctcatcaccaaatgacattgtggtgacgacaccttttcaagtagaaattggctctatggtaggggaatttagtatctgtattccttttgccatgattgaaccgctacgtgaacggctaatcaatccaccaattgaaaaccttcgccaagaagatagcgtttggttagacagtttagtaaaccaagttaagcactcagagcttgagttggttgctaactttactgacattccgctgcgtttatcaaaagtccttaccctgaaaaaaggggatgtactccctattgataaaccagaaagattgattgcacatgttgatggtgtgccggtattaacaagtcaatacggtacagttcatgggcaatacgcccttcgtgttgaacatttaattaaccctgttttaaacgctctggatgaggaacaaaccaatgagtgatgaaaatcgcccaactgataattcacaatcggctgaggatatgtgggctgatgcaatggaacagcaaactggcaaaagccaagataatagttccgacgtattcgaacatctgttacctgaagatgatacgcttaatcatctatctgatatcaatttgattatggatattcctgtcaaattgacagtagagttagggcgtaccaaaatgacgattaaaaaactcctaagcctatcacaaggctctgtagtgtcattagatgggcttgcgggtgaaccccttgatattcttatcaatggctacttaatcgcccaaggagaagtcgtggtcgtttctgataaatatggtattcgcattaccgatatcatcaccccttcagaacgtatgcgccgtctgagtcgttgatctatggaacagatcccttccttttccagccaaggtgcggttaatactgccgcacccgccacaacgcaaactatccaaacaccggcgcaacctttacccgttggacaaagccttgtgcaagtcagcaccgcgcttgcgggtattattgtactgattattgttgcaatgtggcttttccgccgttttggctttgctcgcggtacatttaaagctaatcaagcacaactcacggttaaagcgagctgttcattaggtaccaaagagcgtgttgtcgttgttgaaatcgagcaggaatggcttgtattaggggttacggcatcgcagattaatctgttacacaccttacccattcctaatcatgcctcgcaggaagcgcctataccaccttcttcaccgttatttattcaattattacaaaaaacgctaaagcgagataaaggcaactcataatgcatcagtgtgtctcttattttaacgcattaaagcgctggcctctcttcgctagtgtccttattttgtcactattgccaagccatgcgtttgctcaattccccagtgttatttcacacccattaccgggaggtggccaaagctggtcattgccagtacaaacactgatttttatcacagccctaggttttattcccgccgtattactgatgatgacgagttttactcggattatcattgtgctgggtttattgcgtaatgcgttaggtacaccttctgctccccctaaccaagtggtactgggtcttgcgctatttatgacattttttattatggcaccggtgtttgataaaatttatcaagatgcttatctcccttttagtgaagataaaatcacttttgaacaagcactcgataatggctcacaaccactgcgccagtttatgatgcaacaaacgcgcgaaaccgatcttgcactttttgctcgtcttgctgatgcccccgcatttgaaacacgcgatagcgtacctatgcgaattttagtccctgcttatattaccagtgagctaaaaaccgcttttcaaattggttttatgatttttatcccttttctcatcatagacttagtggttgccagcgtcttgatggcactcggtatgatgatggtgccacccgccaccgtttcactgccttttaaactcatgttatttgtattagtcgatggctggcagttaatacttggctcattggctcaaagcttttttaactagcaaagaggttctttatgacgcctgaatctgttttagcattaggaacggaagcgatgaaaattgccttatcccttgctggacctctattattgtctgcactggttaccggtttagtaataagcatgctgcaagcagcaacacaaataaacgaaatgacactgtcgtttattcctaagatccttgctgtattagcggctattttagtcgcaggcccgtggatgctcagtttgttattagactatatgcataacttatttactggcattccaggaatgattggctaataacaatgataaccttgaccagtgaaatacttaatggctacatcagtgattttttctggccatttgtgcgtattttggcactctttagtaccgcgcctttgtttagtgaaaaacagacacctaaaaaatttcgtattggactcgcctttttaaccacggcgttaattgcaccagggctaccgcaaagtcaagtacctctcttttctatcatggctttttgggtactgatccaacaaattttaattggcacaattttaggcttatctatgcagttagcttttgcttctgtacgtcatgcaggagaagtgattggtttacagatggggctgtcatttgcgactttcgtcgatccttcaggtggcccgaatatgcctattcttgctcgtatctttaacatgttaaccatgttgctttttatggtgtttgatgggcatttatggctgttatcagtattagcagatactttctatgttgttcctattggaaatcagacctttaattcattgggtatccttactttagtacaaagtggtggcactatatttattaacgggatgatgttagccatgccattaattactctactattagtactcaacctttcattaggtattttaaaccgtatgacaccacaactttctgtttttgtggtcggtttccctcttaccctcacgatcggtatgttggcgttatcactgattatgccagcattacctgtgtttactgagcgtgtctttagcgatacattcaatcgtattaccttaatattgcagcaattagtttcttgaaaaaactgatgattgagattgtgttatctatttttccattggctaattaaatttaatctgctttttgtcacttgttttgtttattccacaattaatatatcatttgctataaaccagtgatgaataaagtcagctagataacttaatattcgtgctaaaggatcagcacgggcacttactgctactgcgactaaagtcatgcataaaccttgtactgacttcattcgttacagataaaaaaatcccctgataaatatcaagggataatcgcttattttatagaataagatgctatttactattacgactaaattaacgatacatcttaaacatcgacatctctttcatgtcattaaagactttataagatgcctgtaataccgactcttcttgataataatctgaaattgcttgtgtccaatctaagtcacgtaactcacttaagcgtttagcatttcttaatgaggtatctgcacctaaatcatctaaattatcaagttcttgaagctgtaaacctaatttagcttccacactagaaatattatttaatgtggcgcgattaacacggttagccgtattaatcttatctaatgcagcatcacgatcagcttgtggttttccaactagaggttcacgtagtgcactgatggcttcatctaaggcattaaaaatatctggctctgtgccttttcctcccgatgattgtaacgtttctatccctgtaaagttggataccatttcaatattgctatcaactttttgagtaatttgcttgtctccaccttgataggtgattttacccgttttgtctgcaacaaaaggtggtttatctgtttggaaaccagcaaaaacataacgtccaacaccatctttcgtattgccaatccccactaactgatcttttaaaccacttaattgttccgcaagagaggcacgatcttcatcacttaatgcgccatcattaccggcagccactaatgtttcttgaatttttgtggtgatattgaccatttggcttgaaaggctcatttgcaatgacatgctgtttttagcaaatccacgtgctgtcgcatattgctgattacgcgcttcagattgcttaaccattaccgcttgtgaggccgccatcggatcatcagaaggtttttcaacacgtcgaccactggaaattttattcccttctgtcatccatctactttgcgagctagtaatattatccactcgctgagtgtaaatttgatttgaacttaaacgcacgatttattccttaatcaaagagggtttataagacctgcataatcgcatcaaacatggtatttgcagtttgaataacttttgcatttgccatgtaatactcttggatacgatacatttcgccgtattcttcatccaagttgacccctgaaaccgattgttgctgtgttaaaatactgctggtgatcgcattttgcgcatcataatcaacttgcgcagtattcactttattacccaccatacttattagtgagccataaccaccagcaattgttgctttaccatcgataagtttttcatcgggtaattcgaacaattttttcatgttctcattatcactaggtccagagtcttttgtacccgcggcagctattttgcttggatcgctgattgcaacactcattcctgcaatcacgttgcctacagattgaacaacgatagaatcgccctcttgtgcagctccattgactttgatgctcattccttcgaattctaattcacccgttgttgcattaggtgttgctgtaaatttacgattccccggctctacagtgacattccatttaccaccttcatacttaaccgtataatccgcagctttaacttctcttgtgtcagtgtatttgacatcaaaagtcgcatcacctttgttcttaccattaggcatggtatgtgccccacctaggttgaagaacttatcacctttatcgccgtttaaatcaaaaccttgctcatgttgtttattaaattgatcgcccaacactaaagctaattggtttaattgatttcggcttgcatctaatacttcattacggctacggtaagcgccacctaattcaccgccattaatacgtttagcatcaacttcacggacttcatcaataccgttgctataaccaacaacaaggcgttcactgtttttactggaaggaatagcagagacttcataagagcgcgtccccgcaacaagaggaagaccattggcaaagctgacattaacaaatccgccgtcttgttgggtcacttgtacatcaaccagcgtatttagctcttgaattaaacggtcgcgttggtcgagtagatcattaggctcggcaccattaaaaccttgggagcggctaatttcttgatttaatttagctatctgcttggaatattcattaatattcttagtggtattagtgacttggctattaatgtctttttcgagatcgcgcaatgattgatccgctttattaaacatattcaccattgcttccgctttacccagtatggtggtacgagctgggttatcttccgcattgttcgttacattaggtaagctagtaaagaagtcatcaattgcactggaaacatcattgcctttatccgctaataaattatttatttgcgagatatttttgttatagctatttaaagcactctgttttgttaccgcacgattcatttgccccgcaaggaactcattatattcgcgatgaatacgactcacattaacaccatttccaatataaccattactggtcatcgtgccaccgttttcattaaatacggtcatttgacggttataccaatttactttttggttagcgatattattactaattgtgctcatcgcagcttgtgctgcattaagcccgctcatcgctgtattaattaaattgttggacatttgtctatccttttacgtttagtcatctcctgtatgttcggagcataactaggcaattgatatggatgctctgctatttgttatcggttattcccccctaaacttgaggggagaatagttaaaagagttcacttaaatcatgcgtataagttttcgcaacttgctcaccctgtccctttaattgccctataatagaaacaagttttttggcataccccggatcggttgcataaccggcttcttgaatatgataagcagcctgttctggtgttttggcttgcggtactttggcatagcgcgggctttccgtaagcaatcttagataatcttggatagcctccacataagagccgtagacacggaaattatcacgcatcttgatcgatttaccgtcaatcacttccgttgtcataatattagtgacaggccctttccaataacgccccgctttaataccaaacaggttgtagctcggttttccatcacccgttaaaatttctcgtttaccccagccagattctagtgccgcttgtgctacaactaaaagatgatgaatacctgtaccttgtgtcgcttgtttagcaggccctaacaatttagcggcaaaagaagcgctactttcagacaatccttttaacttgcctaccgtactttcaactgcattttgtaacggttgcatcgcacgatagagctggcctaatgcttgtgttggcattgattgaaaaatatcactgctgtctaatggcatcggcgttttaccggccagttcgctcggttccatcgttactttagctgacagttgtttttcaatcatgtcagcaaaccccaagccttttttggataaatcttgagcaatttgctgatcataaagagaggtgtacattttagtgctttctgaattgaacatactctcttgtggaatagcttcacgcatactttttaacatcatttgcacaaaaaccccctcaagttgctgcgccacttggcgcagtccttgctgatcggcattttgtccaacctgatatttaagtttattcaatgcgttactatcatatgccggcgttgaaatattcggcattgaagaaagcagagataactctttcatcagataatctccaatctcgcccgtaaacaacccgcactttccatcgcttgtaatatcgacatgagatctgttggggtcgcacctagcgcattgagtgaacggatcacttcattgaggctagcactggcgttgactttttgtaatgaaccacccttttcattgacattaacactcgtattacgtgacacaaccgtactgccacctgcaaagggggtattcggttgactcacattcacttggctatctaccgtaacagataagttgccttgtgcgatggcacagctacctaataccacatcacggttcattacaacggaacctgttcttgcattgataatcactttagcatcagcaataactcgttttacctcaaggttttgcacatctgctaagaaacgaacttgttcacttttaccaagaggtacacgtaattgcaccgtacgggcatcaagaggaagagccgttcctacccctcgtagtttattaatcgcatcagcaatactttgtgctagcgtgaagttttcttcgttaagctgtaagtttaataatcccgtttgaccaaactgagaaggtaactcacgctcaataatggcaccgttactaatacgtccacccgctaattgattgacttttacgctactgcctcccgcagaagcaccagagccaccgacaacaatgttcccttgggctaccgcataaacctgactatctacccctttaagtggggtcatcagtaacgtaccacctcgtaaacttttggcattacctaatgaagaaacaaccacatcgatagattgcccagtacgaccaaaaggaggtagttttgctgtcaccatcactgccgcgacgttttttaactgcatattggtgcccgcaggtacggtgatccccaattgtgagagcatgttatttagactttgcgtggtaaaaggtgtttgcatggtttggtcacccgtaccatcgaggccgacaaccaaaccataaccaatcagcgcattttctcttaccccttcaaccgaagtaagatctctgatccgttcggcatgggcagaaaagccgacacatgtcatcacgataaagaaaaggctaatcgctaattttttcatctagaccctactcgttaaaaaggtgatacatttaagaagaaacgttgtagccatcccatggattgcgcttcattaatataaccgtctccgatatattcaatacgcgcatcagcaacttgggttgaattgaccgtgtttgagccactgatagtgcgcggattcacaacgcctgaaaatcgaataaattcagtgccttggtttatcgcaatttgtttttcacccacaacgtgtagattgccatttgccaataactgatcaaccgttaccgtaatggtgcctttaaaggtgttatttgcattagcaccacctttaccaccgaactcactgtttccttccatgcccatatcagtacggctattccctaataatccttctaagaaccttggtgtgatagaagcaaggaaaccggctttaccattgcgactggcattcgccgacgagtttttactggcactgacattttcttgcaaggtgatagtcaatgtatcgccaatatttcgcggtcgcctatcttcaaataatggctgataaccaaaataaaccggctgagtagcctgaaaaatagagccattaggtgctggtgtggtaggcgcagtaggtattgccgtggtgtgtccttcaaccaatggtttttccggtatctgagcgcaccctgctagtgtcagtaccaacagggcggtacctaaacgttgatgacgacgccatctgacactaagcttacttgccccagaattgtcagtaatgacctttgtatccatcttcgatactcttttagtaatacgcctgacagaaattctgtcaggctaatgaatcaacgaaattagagttgcgtgagtttctgtaacatctgatcagaagttgaaatcgctttactattaatttcataagcacgctgagtctggatcatattgaccaattcttccgcgacattaacgttagaggtttcaacatatccctgatataacaagcccgcaccgttaatacccggcgcattctcagtaggtgctccggagctggctgtttctaagtacagattttccccaacactttctaacccgctatcattaataaatgtggtgagggttaattgccctacttgttgaggtgcaggcgatccttcaatctccacactgacaataccatcacgacctaccatcacctttttagcggtttctggcaaaataatcgctgggacgatttgaaagccactggaggtcactagttgcccattttggtccatttgaaaagagccatcgcgagtataagcatccgtaccatcaggtaattgaacatggaaaaaaccttgccctttgatagcaacatcacgcgtaccattagtttgggctaaattaccttggctatgtaaacgttctgtcgccactgggcgaacaccagtaccaatttgtaaaccagaaggcgcattcgtctgctcggatgtcatcgctcccggttgacgaatagtttgatagagtaaatcctcaaaaaccgcacgctggcgtttaaaaccatttgtgctgacgtttgcgaggttgttggaaatcacatccatgttagtttgttgtgcatccaaccctgttttagcaatccataaagaacggatcatggttttccccttacactatttaactcattgatagcaattggttagcgcgctgcgcattatcatctgcactgtggatcaccttcatttgcatttcgaaacggcgggcattggcaatcatatcgaccatagcttcagcaggattgacgttgctaccttctaatacaccagcaaggactttgacgttatcgtccgcaggtaacgtttcacccactcgtgctgtaccttgaggtgataggtgaaatagaccatcatcgcctcgtaccaaatcattttgttctggcttcaccatttttaggcgaccaatttgccctagcatttttggtggatcggtagggacatgagccgtgacaatgccgttattagcaatgctaatttccgcttgtggtggcacttcaattgcgccattatcgcccatcaaaagacggccttgtaccatcaacatgccatcagcgttacgctcaatattgccgtttcgggtatacgcttgcgtaccatcttcaagttgaacagccaaatagccattatcacttaacgcaacgtccatcggtctgccggtgtaattcatcgttccctgacgctgatcactaccgggcgttgacgcgacggtaagtgtacgcgtcggtaaggtttcgccattgataggtacggctcgcatcgcactaagttgcgctttaaaccctggtgttgatgcatttgctaaattgttcgccacgacagcttggttttccattgagtgtctggcaccgcccatcgcggtataaatcacatgatccataacagatgatttcctgcgttattagcgcatgctaactagtgtttgcaggatctgatcctgagttttgatagtctgcgcattagattgatagttacgttgagcaacaatcatgttaactaactcttggctcatatctacgttagaggcttctaaggcattgttggttaatttaccgaatacgccagagcctgccacaccaacaatgggtgagcctgaaccattggtttcagaccacatattgtcaccttgtgaacttaagccaccaggattggcaaagttagctaatgcgatttgaccaaccacttggctttgttggtttgagtaggtcgccataatggaaccatctggctcaatacggaaattggtaaattcccctgcttgataaccattttgcgcgagtttagagacacttgattcagcgactttttgctgcgtactaccactaaagttcatttccatatccatgggttgtgaacctttataagcaacggtagtaaagtttttcagcttaggtgctgtttcatctaataccccgttatccttataaactaatttacccagatcttgtgctggctcacctgttgtggtgtcttgagcataaacactccattcgttatctttggttttaacaaagaataagttcaggttatgttcattacctaagctatcgtaggttgtcacgttagtactaaagttataagaatcgttatctttgggatcaaatttatgtgttgtttgatcgatagcctcttcagctgaattcaagttaaccgtcatatccattttatcggttgcacttgcattcatcatatcggtaggaataatgataggcgttggtgttgcccctttttgtaccacatttttaccgtctacgttttgtactggataacctgtaatacgcataccttgcatattagtgagatagccgtttttatctttgccaaattcaccattacgtgaatagaaaacgccaccgttactatcttcaatacggaagaaaccaccaccagaaatcgccacatcggttgggcggttagtagtagtgatactaccatctttaaagttttggctaatgcctgatacttttacaccaagccctgcaccagagccggcaaaaacatcggcaaaagagactgttgcccccttaaaaccgtaggttgcagagtttgagatattattaccaatagtatctaaattagcggctgctgcatttaaaccactgactgcttgagaaaaggacatgcgccctccattattgaattaatgttgattaaaaaactttacgaatttcgtccaatgaaacgatgacaccgaggccaacatcaagatgaggttttccctctttcatagaaacggaattgactaccgcacttttaagtgtttttactgggacttgcgcatcattaaatgtggcatttactgtaaattgatattttccagtaggaactttattaccatcatcatccgtgcaatcccaaaagaagtgataaacatccggcagaatttttgaattcatttcgatcgtgcgaactttagccccactactatcagtaatattgactgtaagcgtatctattggactaaaggattcaaaaccaaaggcgctggagaagatattttcattatctgtcgcatcagtagatgcaggtaacttatctaattgagtatcaggtgttgtatctgtatctatatctgtatcagatccagcgttttcaccattattaatcttatcaacgctgatttcattaccggcaatcatcaccatatgattaaccaatgaggtagcacgtaatgcctgactttggtcaatttggccaacaatggtattgactgttttatttagcgtctctatcccttcaaccgtagaaatctgtgctaactgtgacgttaactcattattctgcattggattggtgggatcttggttttgcatctgcgtgataagcaacgtcaggaaattacctttaatatcatcactccccccttttttagtgtggtaggatgaaggcgcttccccgataatggtattatcagtaggttcattcattgaggcagaaatacccacaatttattctccctattgacctatcattagcgttttttgcatcagcgatttcgctgtattcatcacttcaacgttagcctgataacttcttgacgccgaaatagtgttgatcatttcaccgactacatcgacattaggcttacgcacatagcctttttcatctgcaaatggatttcctggctggtattccatacgaaagggtgtcggatcatccactacttgcgtaacatgaacaccaccaatatcttgacccgctggcgcattcacttggaaaaccacttgttttgcacggtaaggttcaccatcaggccccacaacgctatctacgttggccatattacttgcactgacgtttaaacgttgtgattgtgctgaaagtgcagaacctgaaatatcgaaaatactaaataaagacatactctttatccttgttgcaatacagccatcatgcttttaacttgagagttaataaatgtcacatctgcctgatatttaacgctattatcggcaaaattactccgttccatatccatatcgaccgtgttaccatccatcgatgtttgatgaggaacccgataaagcaaatcagcctctaagcgataacccggcttaataggaatatggcgttctgatgtcattgtcagttgcaatccatgactaccagtacgcccgttttccatggtttttttcaactcagccgcgaaatcaatatcccgagcttggaagcctggcgtatcagcattagcaatatttgccgccaaaatttcttggcgtttattacgtagtgaaagcgcttcttgttgaaaatgaaacgtattttctaatttatcgagcatcttctatccttggtggctaaaccactcacctcagctgataaaacaatttcagttaacagaataaacgctcaaaaaaaagatgattggaggaataggggtaaattgaattgctatttatgcgtttaaggtatgtgaagaggatgtacactattttggctaaataagtttaaccacaccattagcataaactttataaggtgatacaaactatgtctgttagaacgtttatcggtgttatttcttttttctttatagtaaatagcggtatagccaatcccctacccgaagcgctacagcaatttttccaaacgcgccaccacaaagacgataaagtcaccgtaaccgttttaaccccagaggataaatggccacattgccaacaacaagaaatcctacagcatgcaggctctcgcaattggggacgtctttctatccctattcagtgcgataatcaacgtcgttttatacaagtagatgtgagtgtttatggacaatatttagtcgctaaaaaagagattaatcgtgatgatgtaataacaacatcttcgattaagatcataaaaggagatttagaaaagctaccttatgacgtgttaagagatgctgtttttattaaaaatgccattgctatgcgccatattgcgaccgaaaaaccaataacatcaactatggttcgtcgcccttgggccattttagcggggcagactgtaacggtttttgcacaaggtgatcactttcaaatccgttatgaaggaaaagcgattaacaatgccgttgccaatgaaagtattcgtatacgggtcaaatcagggcaaattattactggtgaagcgctggaaaatggctctgtacgtatccccttgtaatacattaaagataacaattaaaggtaacgataagcagaataagcctatattaaatgacttgttaaccgttttaatgatagcaaggcaaggtaaactctcttgcactataagttgaataaaaacgctgcttgtagactagtgctaatgagtacgctacagcttgaagtacgacgagaaaatactctaaataattcaagttataactaggcggcaagcgaatgagttgctaggagcatacataagtatgtgactagtgcgaatgagtgatgccaacaacgctacagcttgaagtatgacgagaaaatactctaaataattcaagttgtagctaggcggcaagcgaatgagtcgctaggagcatacataagtatgtgactagtgcgaatgagtgacgccaacaacgctacagcttgaagtatgacgaaaaaatactctaaataattcaagttgtagctaggcggctagcgaatgagtcgctaggagcatacataagtatgtgactagtgcgaatgagtgacgccaacaacgctacagcttgaagtatgacgagtaagataacattaaagtttatatctacactgccgatataaaactacaagatgataggcgaaaacacataggttgtttacaatggcttcatctgacgattaattgatgcctaacaaaggattttcctatgagtattgaacgcacaaatccacttatcccaatcacggccatttctcagcgtaaccttaatgaaggtgcccaagaagcacgaaaaaccggtaatacgcaaacaaaagcaatggcgggtgatacttctgtgaaactaagtgaagcacagaaaaaattagttcaacctagcaatcaagacatcaatgtcgaaaaagttgcccgtttaaaagcagcgattgccgatggaacattaacaatggacagcagcaaaattgcggaagcacttttccgagaagctgctgaaagcataactaaataatattaaagattatgatggaagaactccgccagaccttagatcttcagttatcacagctcaataccattgcgggtattttacgtgctgagcaacagttattatgtgcaggaagtattgatatcaataagctgcatgaactaactgaacagaagaattttgtattaacagctctaggtcataccgatcaaaaacgtcaaatactcagtaaacaagttggtattgatagaccctatcaaggacagccttttttagctgatttatggggacaactggttgatctaacggaagagttaaaacatcttaatcaacacaatggcttattgttagagcaacatattactcgcaatagtgaaacgctacattttctacagaaaaatcatagcccaacactttatggtgcagatggacaagcacagcgttcaatattagctgggcgaaaaatacaaatataattatcttttataattaaagaatagtccctgtattatttcaatataatacagggagtgttttgtttaatatattgatttatatgtaacaaccttcagataaatattgaattagcgttaggatttaaatcgatagtaataataagaattatattttaaattaaaatagccttatttgtatttactataatctataatcgttgatctacctaatttatattttgttcccccctctaatcttaattcctctgttcctattaacaagtttttaccttcaatatcaactttatcatcatttaattgtaatataatacgaccatccccctggattttaccaccaagaaatatactatcctcagcgaggatatgaaaaacactattatacgacaatgatatattacctattcctatggttcctactcttccatataaataactatcatcaatattaaatgttctatctaaaagcaacctatccgctttcataaatagaatactatctttaacattaaatgatgaattattaagaacagaagaatattgataaaccattacttttgattgtttcgtcccatcataagctgttctatataaattatcatcttgatttatatctatgtttcctgtgttaattaagctataagactcatgatttagtgacaaagtatttatattaccatgattataaacgttaccctgttttgattttattattaaatatcgactatttattcctgcctctgtccttaacaaaaaatggctgtgtttattataatcatttttagctccaagattaaactcacttaaccccatatcaaaacgaatatattcagcatttaaatcaccgtcaatcaagtctacattattagagataatatttatcattccagatgaaatatctttataatttcgattaatatgcatatgttcatttttatctaatttatttctcatatcaaaaacaacactagaacctatatctgctatagtgaatgtcttagaaaatttccctgtactgctacctgcaattagtttaatatcattaattccagagaaagaacaatcacgacaagaaattccattaggattagctataaccactgttgccttttttccttgtaactcaagctcacctctcagaattgaaaaatctttagaaacaacctcattaataattaattctgcttcagcattattttttaatgataaacccaaattaccaacatcaagacgattataatagatatgggcggtaccatcttgattagtatttatcacttcaatttgtgttttccctgtgtcatcattaatagatacttttgcatctgataatgaatcagaatgtaaaataacatcttgataagcatagcaagataatgaaataaatacagataacagtgagacagtaaatagagcgttttttttcatggacatttcctttggttttaaaactgattatcataattagcacaaggaacaattaatttaaaaaaaaatccatataaaaaacatatagacaaagcatttaaaaaaacatataaataatatattaatgattaagtattcatattaaaaaatacaaataatatttttatatattaataataagatatataaacagccctattaccaaacaagctattaatatttaattttctttctattattctataagcttctttatcaaaataaatctcaccatatccatgtttaatattgcttttatttaaaacatattctatatatagaacaattacttatattcttcttgtttaaactaaaaaaaaccactaaatgatgatttagtggttttagtagatttttatcaatgattaataattaatgattttgtccaccaatcattgatgtcatacgaatatgacgaccttcgctaatttccatatttgataataccgctaactgtggcaagctacggcgtaaaaagcgcgataacagcgaacgtagtgcatggttaaccaagagtactggcacgccccctgacatctcttgacggcgtaccgcatctaaggcttgttgttcaatgttttcagcaaggccaggctctaatccccccccactttgcatcgcttgtaataatagacgctctagtcccgcatctaatccaataacttgtatctcttctttatcaccaaaccagtgttgtgttatcgccctgcgtaatgcaacacgaactaccgccgttaattctgccggatctttttgctcaggtgcatgctctgctagtgcttctaatatggttctcatatcgcgaataggcacttgctctgccaacaggttttgcaatactttatgtaacaccgttaatgacagcatatcggggatcatattttccgtcattttcggtagttctttgcttaccctatcaaatagcatttgcgcttcttggcgaccaaataactctgatgcgtattggttaagtacatgattaaaatgtgttgcaatcactgtacttgccgccacaaccgtatagccttgtacttgtgcttgctctcttaaactgtcatcaatccatactgcaggtaaaccaaatgccggctcttgagtgttatcaccttctagcgttcctactgcattaccggggtttatggccaaccaacgcccaggatgagcttcgccatggccgatttctacccctttcattaaaatgcggtaggaggaaggttttacttccatattatcgcgaatatgtacaacaggaggtaaataccccatttcttgtgcaaactttttgcgaataccactaattcgacctaacaattcaccattttggcgattgtcgaccatgggaataagacgataacctacttccattgacagcggatcttctaattgcacatcttcccaagaggcttcaacaacccgattttgtttttcaacttgttccaactctttttgttgttgcacttgaggactgctatgacgttttaagatataccatcctaatcctgctaatgcagccgtaaagaagaggaaaacaaagtttggcatacctggtactaaccccagcaatcctaaaacacccgcagttagcatcagtacacgagggttatcaaagagttgcgtcaccatttgttgaccgacatcttcatcggttgcaacgcgagtaacaataacacctgccgctgttgatataatcagtgctggaatttgagccactagcccatcaccgatagttaataaggtataagtgcttgccgcatcgttaagtgccatattatgttgtgcaacaccgaccactaaaccaccaacgacgtttattaccaagatcattaagccggcaatcgcatcccctcggacgaatttacttgcaccatccatagatccataaaagtcagactcaagcgagacttctttacgacgttttttagcttcttcttcgtttatgatcccagcatttaaatcagcatcgatagccatctgcttacccggcatcccatctaatacaaagcgtgcgcctacttcagcaatacgccctgcacctttggtgataaccataaagttaatcagaataagaatgataaagacaacgataccgatagcaaaattgccacctacgaggaaatgaccaaaagcttcaacaacacgccctgcagctgctgaacctgtatgtccttccatcaagataatacgtgttgatgcaacgttaagcgataagcgtaacaatgtagtgaacaggagtattgtaggaaaggcagcaaagtccaatgtgcgcctagtaaacatggccactaatagcaccatgatagaaagggcaatgttaaaggtaaacaataagtccaatagaaaaggtggcaatggcagtaccatcattgacagtataagcaaaataagtactggccctgccagtatctgccactgagaacttttccaatttcccggcaagcggagtaatgaggccaaattagccatgacgattatcttctccagcaaagtccagtgcgggaggcactggcaagttcataggttgtttaggttttaaaccaccttcggttttccatcgtctcagttgatagacccaagctaaaacttctgcaacagcggcatagagtgttgcaggaatagcctgtcctatctcactgtgacgatataacgccctagcaagcggtggcgcttctagaagcggaattcgatgttcagcaccaatttctttaatttttaaggcaatggcgcccgctcctttagcaagtacttttggggcaaccattttgtcgttatattgcaaagcaaccgcgtaatgcgttgggttagtgacaatgacatctgcttttggcacatctgccatcattcgtcgccgcgacatctcgtgttgttgttggcgaatacgcgcctttaattgcggatcaccctcttgttgtttaaattcgtctttgatttcttggcgtgtcatgcgtaactttttcaaatggctacgaatttgaaaaataatatcgaatgccaccatcgggataagcataaaaaccgcaatatagaccgcaaaaataagcagttgcatcgcattagctaaagcacttaaaggaggaagcgtgatcaaatgaagaatatcgttccagttgtgccataagaaaaccgttgcggctaagccgacaaagagtgattttaaaatcgctttaaataattcagctaacgcattcattgaaaaaatacgttttaagccagaaatagggttccattttttcggatcaaacttgatagatttgctactaaaattaatcccccccaatacggctgaaccaccaattgccactaagaccaagcctagaaacactggcgataacgcaaatacagcctgtttcattaaactggcaaaacgggggatcaataaattctcgttgccgattatgtggtgattaaaagtaaaaccttccgttaacatggcataaagctcacgagtgataaaacgcccactcatccacagtagactgacgccccctaaaatcattaatacggacgaaagctctttggaacgaacaatttgcccatcctttttcgctttttcccgtttatggggagtgggttcttctgtcttttcgagatcgctatcttcagccacagtctgtccgatttagataattagattaaagcctgaatgaaatgtctcttagcatgacaaattcagaagaaattgatgggttgaacaatcgcaaatttacggggctttttgggctatgaaggtataaacagcaaaaaagtgtgctacttacacatcacctttgaaacaacatatttatttggtgcaaatatggagggtttatcgcaagaataattctatggtgaatataaggtaaaagcgtgtatttctcaccatcaaacaaaagccgcttagataaagcggcttacattttcttcaatagcctgcgctattaacctgttttttggttgttttttatccataaaatagaacatcctcaaagagcagagatagagcgaatgcctcctgcaagccagttatgtccttatcgccctaaactcaccaatagattagaaacctaaactttccagtaaatcatcaacctgatcttgattcttaatcacaccagcattgtttttattgacttgtgggccatttaataatgaatcagtctcttttttcgcattggatttttcaagttgctctggtggcagattttccattaataccataacaagttgtttttcaatttcttgaaccacactcatcatacgtttaatcacttggcctgttaaatcttggaaatcttgcgccatcataatttcaagtaattggctatttgtaaaagccgcactttcagggatatcccgcaaataattgcgggtatccgttacaagagagcgtacatctttgagatcttcaggatgctcaaaccattgatcccagcgttcagttaacttagttgcatgactacttaactcatcctgttttggttgcgcagcttccacacaatttaatgtacgctcagctgcctgagcggtcatttgagcaacatagtccaatctttcccttgcatcaggaatggcttctgctgcttctgctattgctttatccaatcctaattctcgcaaactgtcgcgtaacatacgcgtcaattgtccgatccgactgataatatctgacgttatttcgacattatctttcggcataattggatccccactcattgcgactccttagatgcccagtttttcaaaaattttattgagtttttcttcaagaatggctgcagtaaaaggtttaacaacatatccacttgctcctgattgcgcagcagcaataatattttcttttttcgcttcggcggtcaccatcagaacgggaagcgttgcaagccctgcgtcactacgaatattcttcagcaactctaacccatccatattgggcatattccaatcggtgataacaaaatcatatgccgaactctgtaacttggctaacgcgtcagcaccatcttctgcttcttctacgttcataaatcctaactcctttagtaaattacgaacgatgcggcgcattgttgaaaaatcatcaaccactaaaaatctcagatccttacttgccattgaaaactccttcaaaatatattggcaaattactgtgttgctgtttaaactgaacttaatcagatacgcaatgattgtgttgtgctgattttcatcagcacggctttactcattgagcttatactttttacctcatctacggctcccaattcgaccgcggaacgaggcatcccaaagacgacgcagcttgcttcatcttgtgcaaatgtgtagctacctgcacgacgcattgctaataaacctgtagcaccatcactgcccatccctgttaaaatgacaccaatagcattacgccccgcatatttagcaaccgaattaaatagcacatcaacagaaggtcgatgccgatttaccgcaggatctttatttatatggatctggtaattagcaccattacgacgaagctccatatgataatcacccggtgcgatgtaggcgtgtccaggtaaaaccctttctccatcttcagcttctttcacactgatttggcataaacggtttaaccgctctgcaaatgagtgggtaaaccccgccggcatatgttgggttattaatactgcaggactggtaataggtaatggctctaaaaaatgacgaatagcctcggtgccccctgttgaagcaccaacagcgattaacttttcactcgaaatcatgggagtaaatgataacgacttagacggtaatgttttcgtttcatgacgactaattcttgcctgagccgctgctcgaattttttctgcaataagttcactgtaggccaacattccttcacgtagacctaactgaggtttagtgacaaaatcaaccgcccccagttctaatgcttttaatgtcacttctgaacctttggctgtgagtgatgaaaccatcaccactggcatagggcgtaagcgcattaatttttccaaaaaatcaataccatccatgcgtggcatttcaacatctaacgtcaatacctgtggattaaacttttttattaagtcacgagcgactatcggatctggcgcacaatcaacgacctccatatcatggtgactattaattatttctcgcatgatctggcgcattaacgccgaatcatcaacacagagtaccgttattttattcataacctctccttgctggtgtcagcccgtaaaccgtatgcccctgcaagtaaaaatccttgcttagttggctcacattttcagaatgccctacaaacaacattccatcgggtttaagcaatggtataaatcgatgaagtaagctttgctgtgtcgttttatcaaaataaatcatgacattacgacaaaaaatcgcatcaaatggcccttctaatttccactgcttgtcaagtaaattcaaatactgaaaagtgaccatttcacttacttgtggtctaattttcacgtatccggcaaaatcaccaacacctttgagaaaatattttttcaaatattcttcgtttaacgtttttaactcttccagtcgataaacacctttacgggctttttccaacacattagtgtcgatatcgctggcaataatttttgttttataggggttatccccaaaaacatcgcgcaaagtcatcgctattgaataaggctcttctccagtagatgcggcagcacaccatactcggtaaactcctcctgccctgtttttggcgtgtttagccaaaataggaaagtgatgtgcttccctaaaaaatgcagttaagtttgtggttaacgcattaataaactcttgccattcagggttgcatacatcactttttagaaacgcaagatagtcaccaaagttattcatccgtaattcacgtaacctcctcgtgagacggttataaaccatttcccgtttgttgttagtcagcacaatacctgctttttgataaatcaattggcagattgattgaaactgatcatcggacaacataaaccgttcagaaaaaaaatctaacggttgagcagcgatatctggcaattcttcagtaacattacgtttcattattttttaatgggtctttttaaaaaatgattttttatctgctttcttcaacccattaccttctaaggagtgagaagatccgtcttcatccgtgtcaggcaattcgaatgccgatacagcattaaccaggttgttagcctgatcttctaatgctgtggcagcagatgctgattgctccaccaaagcagcgttttgttgtgtcacctgatccatctgactaacagcatcagcaacttggtgaatacctctactttgttcgtctgaagccgaggcaatttcggccattaactcagtgactttatttacagatgtgacaagctcctccatcgtttgccccgcatcatttactaatcgagatccctgagagactcgagacacagactcgtcaataagtgttttaatttctttagccgcttcagcactacgctgagcaagattacgcacctctcctgcaacaactgagaaaccgcgtccttgttcacccgctcgcgccgcttctaccgcagcattaagcgctaagatattggtttgaaaggcaataccatcaatgacactaataatagcgcctatcttttgagaactttgagtaatagcatccatcatttcgaccacactgtgagtaatttcaccgcctcgtagtgcagtttcagatgcagattccgccaacttactcgcttgtaacgcgttatccgcattttgtttaactgtcgccgttaattgctccatactcgcagccgtctcttccaaagaagcagcttgttgttctgtgcgcgaggataaatcggtattacctttggaaatttcttgaatacccgaatacatcgcctgactgttatcacgaacaatacgaatagagcgcgccaactcgccacgcatctcacgtaaccgtctaaaaatgtcacctatttcgtcatcagtaaaaaccagaatttcacgatttaatttgcctgttgcgacatcattaaagtaacggcttaaacttgcgaaaggtttaataatattaaaacttaaccagcgatgagaggcgattgacaccacaattaccatggtgattgcgccaataaacattaaaatagcgatagtataaaaatgatgtccttgttctatcgaatcagccacttcgtgttgaacgtaattcatataggtattaaatgaattttccattgcagtttgatagcgttccgttggttgatctaaaaacccttgaaaatcgcctttttttaacatgccatgtaattcaactagtgcactataaagaacgtgataatcattttttacggtattaaaaatctctttttcttcttgtggaataacctcttgattaatatctgtaaggaaattttgaaaatgagtatttgctgtttccaaacgtgataatgcgattgattcaatagattggatataatctgttgactgttcagttttcattcctatcgcaacgcgatttattgcattacgtgcttgtactaaagatacccaacttaatcctaattcatctcgcttagcagtatctaaatcaattctagtgatctgattgttgtttaaatgaataattcccagtgagatcccactggaaataacttgcatcacacaaaacatcatcagtaataaatagagactggtggatatctttaatttacgaaacctaaacatgccttcacctcgttataagcggtagcaaatcactaccgcttgtcagccacttgttgttgttagaaagtttcccagttagcgggatcttcaacactgctgctctttttcttttctgaggttcctggttttataagtggagcagcggcttgtactacagggggtgcatccaattcctttttctctaatgctttttcttcctgacccggtaatttgaagatggaaactaagcgggttaatgcaactgcttgatcttcaagacccgcagcggcggcggcagattgttctactaaagaggcgttttgctgagtaacacgatccatttcagaaaccgcaagacccacttgtgaaattcctcgactttgttcatccgatgccgaggcaatttcccccataatatcggtaacacgtgtcacagattcgacaatacgagtcatggtttcccctgcactttcaactaataccgatccggtttcagtgcgactaacagagtcttcaatcaacgtttttatttctttagcagcttctgcacttctctgtgcaagattacgaacttcgccggcaactaccgcaaatccgcgaccatgctcaccggctctcgcagcttcaacagccgcattcaacgccaaaatattggtttgaaatgcgataccatcaatcactgcagtaatatcggtgattttttgagaacttccggctatgtcgtgcatcgtttgcaccacattagccacaacttttccaccttggcgggcaatatctgaggcatcattggcaaggttacttgcttggcgtgcattatcagcattttgttttactgtcgccgttaactgctccatactcgcagcagtctcttctaatgaagcaacttgctcctcagtacgtgaggataaatcattattacctgcggcaatttcactggtgctgttatagatattctcagtactttgataaacaccacgaacagtatgtataagctcttgttgcatgtgctttaagccacttgctaataagctcatttcattacgtccatgtacctcgatatcgggacgtagatccccttcagaaaatgctttaatatttaataacaatgaattaagtggtcgaattaatgcattgcgtagtgcaaaccaacaaatgatgagtgctgtaacaacaataatggctaatatcaccatcgtgataatagaacgctgatgagaagcttctaatgcactatttaattgattattaaacttctcattacgcataacataagcaagatactctttataaaaaccatcttgataagaagtcgttggttgttcgaaaaaatcttttaagtttttatcttgcagtaaaatttctaactgatttaatgcagaaaaatactcaataaaacgcccttttaaattgcgtatttcttcttctgaatgaatttgataagcatttatatgctgttcaaactctttaaatttatcatcggcccgagacatatttttacgtgccagaccagttaaatattctacagacaacgagctatcaacattcagatctttatcctgtaacagatagcttatagctgcacgattgatattgttacgcgcttgcaataagtttgcccagctttcatctaaacgttcacgctgtttttgtattgtgagagttttatccagatcttgtcttgtttcactgagatttgagtaaaaaacacccccggagataaactgcaaaacaccaaacaacagaagaatggataacaacccagtcactattttcattcggctaaacatgagtttccctttttataatagatggtatgaccaagttatcggcagacttaagagaaactttataggttttatcctatatagatactattttctatttacaataaataaattaaatatcaataagttatattttaaattctcattttaaaaacctgctaggcataatgcacattcattttttagttaatacatttaaaaaaaataacttaactaaaattaaaagtactctttctgctttaatttcacttaattaatattaaagccccaagaaataacaaataattgaaaaaactattccggcaagatagccggaacagtattaaagaataagattaataggctaaactttatttagccataattgttgcgctatcaactaattccatttcttcgctattgagtaatttttcaatatcaaccagaattaacattctttcatctaaagtacccaatcctgttaaatattctgttgacattgttaccgcaaattcaggagcaggacagatttgttcaggttttaaggttaatacatcagaaacaccatcaacaacaatgccgacaatacggttgagtaaattaaccacgatcaccactgtgttgtcattataggtaacattttcttgtgaaaacttaattcgtagatcaacgataggtacaataaccccccgtaaattggtcacacctttaataaaactaggtgcattcgcaatacgagtgacttggtcatagccccgaatttcttgtacttttagaatatcaatgccatattcttcgttgcccaacgtaaaaattagaaatccttgtccaacagtttcaccggataatttctcgaaatgttccgcagccataatcttattttatcctcactattaaataactgtatgcgcagttgtattctttttcttttctgtcatttgagaatgacttaaacgttgtaattctggaacatcaagaattaaagcaacactaccatcgcccatgattgtggcagcagaaatacccggtacttttcggtaattgctttctatatttttaacaaccacttgatgttgaccaactaacttatcgaccaataaagcataacggcgccctgcactttgtacgataaccgcaatcgcttgagtaatatcggtttgcgcaccttcaatattaaaagtacggtgtaattcaataagcggtaaatattcacctcttacttgcaataatttttcatctcctgctaaaggataaatatcttcctcttcaggttgtaatgagctaaccactgttcctaatggtaaaataaatacttcatcattcacttttactgacatgccatctaaaatggccaatgtgagtggcagcaagatgcgaatgcgtgtaccttttccaacttcaaaactaatttgaatttgcccccccatttcttggatatttcgttttacaacatccatacccacaccacgtccagaaacatcggtgacaacctcagcggtagagaaacctggcgcaaatatcaacatcgcaacttcttcattgctcatattttcagaaacagctaagcccgatgatatcgcctttttcaaaatacgctcacgatttaatccagcaccatcatctgtcacttcaatacaaatattgccaccttgatgctctgctgaaagcgttaattgacccgcctctggtttgcccgcggcaatgcgatcggcaggcatttcaataccatgatcaagactattacggactaagtgagttaaaggatcgatgattttctcaattaaacttttatcaagttcagttgaactaccaatcatatttaactcaacttttttatgcattttgccagctaaatcacgaacgacccgcggaaaacgactaaaaacatattccatcggcatcatacggatagacatcactgactcttgcagatcacgagagttacgctgtagctgtgcaatacaactgagtagatcactatgaatagatggctcaagcgtgtcactatgttgcgctaacatagactgagtgatcaccaattccccgaccaagttaatcagttggtccaccttttcaaccgcaacgcgaatactggttgattccgttttggcctgagcaacaacaggttttcgcgcaggggctggtgtcgcagttggtggcaaggttgtagcaactttagtcacttcatctgcttgactatttttattcaactcagcaacgtttttttctatcgtagctggctgctctgtttgagcagcaggctggatactttctgtcacagatgagggtgagtgttcggcttgctcttgcgttttatctgtagacgttaccttttcctcagtagcagcaacgttagcaaaggaaatctgttctggttcaatcacaaaacataataccgcactgatatcttcttgagttgctgtggtttttaataccgcttccaacccatggtgctgtttttcaacctgactaacttcacccagatgctttaattcatctagcattaaatcaatatcggtctcttttaaatcagataaaataatatggtgctgataaagaccgtcagtatttggtgtattagccgttgctagcggttgattttctttactaagctcatcgtcagtatgatgcactgcagaaacaggagtgatgttctccgttggggcattactttcagttaaagatactgagtcactcccctcacctaattgagttgattgttcctctttgacttctagagctaactgacgcaacttctcacaaatatagttaaatgtttcctcgtctggctcttgtgagtttttatgtgcatccaattgctgttgcataatatctttcgcttccagaaacaggttaataatgtcatcggtaagtaccatttcatggcgtcttgcactatcgagcaagttttccagcacatgagtggtctgctgaagtttaacgaagccaaatgttgcggctcctccttttatggagtgcgcactacgaaaaatagcatttaactgctcttgatctggattttgcggatcaagtaacagtaaatgctgttccatatcagctaacaactcatctgcttcatcaaaaaatgtttgataaaactcggtaatatccatcgttactcattcacctttacgcgattacatacaaactaaggagttgtttcctgttttgtcgtaatatttgtcgattgtgatggcaaactttccccagaaactcctgtttcaacattttccttttttgattcgggaagcttagatgtagaagaagacacagacgaattcgtctgtgtattttctccgttttcttgtggggtttcttgccctgaaagcagaggtttaatttctgatgcctcttttattgctggtgcaacccgctcattttcatgtacaattttcttttcttcctgcttagttaaaactaatatactgatccttctattcgccggagcaaaaccatcctcttttactaagtgaacagttgatgccatacctacaacccgtagtactttccattctgcaagccctgcaccaataagttctcgacgagatgcattagctcgatccgttgataactcccagttactgtatttgagtgcaccactcgcataaggaatatcatcggtatgacctgataaactgattttataaggcgagtcatttagtattggcgctatcgcagttaaaatatctttcatataaggttcaacagtggcactaccaactttaaacattggccggctttctttatctataatttggatacgtaagccttcgtccatcatgtcgattaataaatgaggttttaaatcttttaagcgaggatcttgtaaaataacttgctctaaattctctttcagtttacggaattgctgtttttcattgagctgtttatcttcgacaccttttggcagtacatcaccttcgttatacacaggatcacgtcctccccctggtatcgggtttgtcacgtctccactaacgcggcctttttcaatggcaacttttagaggtgtgcgaaaatattcagcaacacgagttaactcttgaggactagcgatagaaagtaaccacatcaccagaaagaaagccatcatggcagtcataaagtcagcgtaagctatcttccacgcaccatgttgtgcgttgtgctgttttttccctcgctttttaactctgattatctgtgaattacttttcataattactcttctttcattgcatcaggatttgcctgcatcggtgtccgtacctgacgtacatgttcttccaattcaataaatgaaggtctgtctgccagaaagagggtcttacgaccaaactcaaccgctatctgtggtgcatatccattcatgctagataacagggtggtcttgatgcactccatcattttcatttgttgactagagcgttgtctgatacgagaagctaatggtgaaacaaagccataagctaataaaatacctaagaaagtacctaccattgcgtgaccaataagtgcccccatttccccagcaggtctatcggcagcacctagcgcattaaccacccccataaccgcggccacaataccaaatgcgggtaatgaatcgcccatcgtagagagccccgccgcaggtacttcactttcttcttcaaaagtggcaatttcttcgtccattagtgcttcaatttcataaggattcatattccccgtcaccatcaaacgcatataatcagtaataaaactgagcatataaacgtctttcataatgcgaggatattgggaaaaaatgtcactttgttgtggattttcaatatctctctctaatgccaacatgccgttttggcgcgctttagacagcaaacgaaacattaatgccattagatccatatacatcgctttattgtagttagtgttacgaagtaatttcggtaggatttttaccgttgatacgatcgcacgaccattattacctacaacaaaagcaccgataccggcaccaaaaataattaaaaattcagcgggttgatataatgcgcctagatgtccacctacgagggtaaaccctccgaggacagcacaaatcaccacgatatatcctaagagtactaacacgcgatatccctttagctaatttcgttatagagagaatggcgaacataaccgcaaggagataggaggggaagaggaaacaactcaggttatagagtctttaatctataacctgatatttaactttcaatctcgaatcacattgcaaactgttcaagaccatccaacagttgtaagttaatatcggcaggattggcggaaagtttacgtttttttattgcccgagatggaggctgacaaagactacaaacataattacttgcaggctgatgtgcgtgtgtaataaatgaaccattacatttggtacatacagaaagttgtaacataccactttcaacaaaacgaactaatgtccatgctcgtgttagtgctaaaataggttcttgatctttaacgggtggacattgttctaaatataaacgataggcttttacaacagcttcaacacctacactccccccgctttttaataaaaagcggtaagcattataaaacattgaagaatggatattttgttcccatgtcataaaccaatctgttgaaaaaggtagcatacctttaggaggagggcttcctcttaattctttgtataatttaattaaacgccctcgacttaattgcgtttcgctttcaagcatttgtaagcgagcacctaaggtgattaattccattgctaggcgaatatctttcgcctctcggacgatacttttctcactcattgttatgcccgtttctttgtagcagaggtatcatgttccgatagttgacggaacaagttagaagaaagaaggataccagtatgaatttgttgcaaatcatccactctggattctttagtgagttgttctattgtttcgctgtcttcaaaccggaaattacagattagttggtttgtttcagccaacttaaccaattgaggcaatgttagctcttttagtgcatcagccatagaatcgctgatacccagtctaaacattgcggaagccttttcttggttaattaacctctgcgccaaaagcaaatacgataaatttatgtcataaatatgcttaagcaattcaaccgtactcatctctttacatcccgtccgattatattgaacaaagaggatcttgtttaaagtaagatcccgaggaaattaatataaatgtatattgaatttccaggccccattttatgaatatgactcgtagtaacactaccttgtattacttgattacgatcatttcaaaaagtagcgagaaaaacatttaaattaaaaaggattttaaatgctcgccaatatatcacgttaagaataatcctaacgagataactttactccttaatgattaagttattcaacggataaagtagtctaatttaaatactatgtgagttacatcacaaaaagataatcattattatggaattagttcattaactattcaagtaatattagtaataaaacttgctgagaattaataagcgaatctacccaaattaaaatattaatgataattttttattttatacgatctattaaacttataaacctaaaaatacagcataaaaaattgacaaatctaaaattgaagtttttttcgatcacagtaacatatattgccatagctcctcctcatctttgtctgaacaaagcacttgtgtttaataaatatttctatagatatagtttttttagtcatttaccgaaaacaccataaatgatcactttttatttacaattggcataaaaaacaaccaatcataattaatttgagttatctaattttataaattaattaaataaaaaaaattacacttaaaattcataaagataaagcataacactcttacattagcaggataagttatacaaaattaaattcctagttatgcatcttaccttataaattattgaatatttatttctatcacataaaagttttattaataaataattaaaaattactaatcaataactaaaagtgcaaaataataaagctatataactctttatgcgtgttttaccgaacaaagattaatcaatataaaaaaacatgacaatacaggtaagatttatttatggtttttacgtaacaatcaaattacttaccaactttttttagaaaaataaatataaatccataggagaaaaaacctcatttaaaaatataaagtagcaataataactttatttacccaattaaattcgataaaaaaaatatataatatttgacttaaacttaatataaacaaaaataatttattttttatatttcagccattacatttatataaaaaaataaaaacacatataaataaaaaaaacaggctattatttaaataacatagtatcaataagtaaaaaaaacagattgattttattaaaataataaataattaatttattataaataatcagtgtgatttttttatttcttatccgttattctgataaaaatagactacaaatgaaataactatttcattttcagcaaaaaagttttaccgatctcttctttcaaaatgattgagacatagaaaatttagaatggaaattccaacttactcatttgcaatttgatcaatccctatcctgctttaacgctcaccacctaaatattaacatttgtataaatcatttatccaatgtcaatattaacaactatttttgatcaaaataacctcttattgcctactcaatcatcatcattaataaactgtaaaatagcaaatgttactttttttatatatgacagataagatagcttaatttacgaccaaaaataatacgttttttatttttatttgtcttttttttaagcatgttttccgatggtttgagaagagtagccttagccatttcttagcgctaatcagctaatatcaatgcttaacaaaagagatgatgggttcttctaagaaaggtattgataaaaagactgcttttttaaacaaaaaagcaaacttatttttatcatttttatttattgtgatattgattatcatcaacattactcaaataaagagtagaattggtgggaaataactttttgacagacaacacacaataagcagattgatataacaaatttattcaaaatagttatttatcactattttttatcataaaaacaaataacctcagttacgcaactcattactcaacgatctcatttttatgtaacaaataagataaaaatattgttagccatctttctgtcaccatcaactataattatttacgtaacaacgcccaataacatgagcaatagtttagaagtcgattagccttttatcgaccatgttctttttgattctcgctaacctttagtattttcttttccccgtacttttacttaatctttttaatcatttttgtatcatgatataatacgaaaaataagcctctaattatttctaatagaaattacaatggtgcatttatttcgttattcgatgatttttttcttctataagtcagactcatcttcttgataaagatataaataatgtaatattgaaatagatattttatacaataaatagattagtatgttttttcaaccagtataataagattacttattggtagcatttcccctacagcttgtttacaaaaaagaatttatatcctaatgatatgtatcaacaatcaacacttccccccattcatcagctttactgtagccccctgctgtgtcatctacacaacttttctcctcccctgacttgctttaagtgcacttttatcaaaaatatttctcaaaaagcagtaggttaacgatcgtcaaataaagaataatgataaataattcatcgaatatattgaaattgtttgagaatatcatcgagtgatatgtacgacaccaaagttttcaatagaggcatgtaagtaaatgcatcttgtcttaagccctttagtaacgattttgtgtgctaggacaattaatagactcatcaaatgggtttttagtaggaaagccactccaccaaatcggcttaacataattttaaaatgcgttttttgatttaaaataagtttccattgataaatggttttttattatagataactttattctttcatctaaacaaagattgatgatacatgttatcgatcttattcagctataaacatagtttcacaatgaataattacacatatgaaataggttacctttaaccaccagtattaatacttagttaattttctattatttataatgctaaactgtattaaatagcgtttaaaataagctaaattccctcgttttcagttattgttttatattctacttttgttgatattatccccactattcttataaaacacattaacaagctctattgctgtggggataacctctatttatactcacaaagtattatattttatatccataaagtattaggcgggatgctcagaagcaattttccaattaattgcactgacacttttttctaaacttatcctgcaaacaatggcttctatctctttttgctcagctggggtagccaacacttcagcacaaacttctaattgactaggcattggtgtatctgcgctacttaatgattgcaatctcacatgtaaaccgtttatggcttgcaaaataagtgttcttaccaaaacttcatcgtgggtatcacaaacaatacgaatagaatagcgttgttcaatatctgtcgcttgatattgcggttgggcatttattcgttgagcagcttcccgtaatagaatattggcacaaagaataagcaatgtcgctacggtagcaagtggatagagtccaagtccacataacacaccaatgcccgcagagcaccaaagtgtcgccgcggtattaagacctcgaatattcattccttcgcgcataatcacccctgcgcctaaaaaaccaataccagaaaccacttgtgcagcaatccgtcctgggctatcgggtgaagtttcaatggagcttaagataaataccgcagcaccggtcgccactaaagcattggtgcgaagtcctgccattctttgacgccattgtctttcggcaccaatcaaagcaccaagacacattgcaacaaccaaatttaagatataaggagtcatagccattttaatttcctccataaacaatggctaaaaaaacacgccgttatacggctaatgaagtaatacaacaacggatctttggctacagcaatctaggaggaggaaataaggagaaaaaaacatagcacataaaatcacctcttagtaataagagcatctcaaggttagtgcgattctatgtaaaacgaggttcaagaagtgcactgcccaccggtaggtaagcagttttagcggagaaaacggcttaccaatttattttttgcattaatttactactttgcgtatccatctgttttctcttcgtcaaaatttggctggtagtataaataggccattgcacaatgtaaatgaacgcttcctaaaccaatcatttttgttgtactggtcgaacaaaagtgccttcaccaccttctttttcattaaaaaaccaaataccattcggatattcaggcagtgaaaccaagtacataatgccttcattaaattcttcaatcagtaaaatggttccttgacgatcttcacagccatccgtttttactacaacatgatcattaacgttcatttttactcctgataaaaattctcattatcttctttttattttacccataaagaaaaagcctgccaccagaaggtgacaggcttgaagaaaatttttaaaaggcttttattacagagctgttacgttagcagctgctggaccttttgcaccgttttcaattgtgaattctacgttctgaccttcagccagagttttgaaaccgttaccttgaatggcagaaaagtgaacgaatacgtctttgcttccgtctgctggagtaataaaaccaaagcctttagactcgttgaaccacttaacttgacctttcattttgtcagacatgtgactttcctatatatcaataaaacgttgccttctcggcatctactggcctgaactacctataacttatgggcacacatgaagaaaacggtcaaaaagcgatgctgtttaaaactcattaacttagaatgtcaatcataaatcaggtctgtatttaggccttactcattaacgcatgagacagggttaatagcaatagttttatgcattgaaagattaaaaaaatgcaaattgcacataaaaaatacaaattcgcctctatttttgtcactgtgtataaaatttatttgatattttatagcaattattaacagcaagtaggaatagtcttaagagactaacaataacagttaagcgtcgaatttaaaaaaactgttctatctgctgatcctgtctccatgataatctattcttaagaaacaaatttgcaacattcatcttttaaggtatttacaatgaatgtattaaaagacattttagagcgtgatttagcacgtattaatgccgcagaaaagcgtgatggcaaaccacactttaatagccaatttttaaaaaatcatatttggctttgcgtcagtatggtgttgtcatatttattactggccgctttgcttatttactctccttactttggggtcatttcgctgactcttttcactttgatgtttattgtgatggcaggaatactgctatttgatatcaaacctatttataagtttgatgatatcggcgttcttgaccttagagtttgctataacggcgaatggtatacttttgaaaaattatctgatgaagcgattaatgagatacgccagcacccggctatcccagcgcaaataaaagaagacatcaatgacattatacgcacaaaacaagagatacacttttatgacgtgtatttaatcgcattcgatcccatcaccaaaccgatttcgtcagaaaaattatcaccccaagtctaatactatgagaaattctccgtgttattgcacacaacacggagaaccttaaccattttttagccatattgtccataaaccaatcaaacagttaattaatctattttttaacgttgacaccctgatatatcatcgctattatgcgcctcgttctcaagagaacacaattcctccatagttcagtcggtagaacggcggactgttaatccgtatgtcactggttcgagtccagttggaggagccaaatttagaagagcccgctttatgcgggctttttgcttttctaaataaactagtccctactagcctttcatgctcatcagcgatatctatatataactatttattttttatacttttttatcaaaaaaacaacaaaacggtgcactcttgagcaaacaaacattttttttgtttttttgctttacaagggaaaagaggatagctattattcgcctcgttctcacgagaacacgcttcctccatagttcagtcggtagaacggcggactgttaatccgtatgtcactggttcgagtccagttggaggagccaaatttagaaaagcccgctttatgcgggctttttgcttttttaatgcccattatttcttttcttatttatcacttttattcattgtctaattttaagacactgctgcacaatgatctttaagtgactcttttcttactcatgatatggcagaatgtggctttttagggcggtaagaatatcaacacagtatatatactgtgccgaaatcggtataattttagataaaacacataaatcagttattttttaaccacttaagctattattttattttttttactttacaactgccctctctctcgctattattcacctcgttctcaagggaacacaattcctccatagttcagtcggtagaacggcggactgttaatccgtatgtcactggttcgagtccagttggaggagccaaatttagagaagcccgctttatgcgggctttttgctttttagccgatagcatcccacacttagtatgctgaaaaataaatttttctctgtttcaccctataaattccagcatctttttcattatcttgttcattattcgctgatgattgatgcaacttgctgtttatctatccatttaaacaaatatctacgattgacctttgacatctcaattttaccactatatgatacacgccacttaatgatgttcctccatagttcagtcggtagaacggcggactgttaatccgtatgtcactggttcgagtccagttggaggagccatttctattagtattaccctcgtaactatttgattttattctctgttttccctcacacacaataaaaaaataccattaaaaaggtagctatttaatcgttttcgtattactattcatttccggcttgactatccagtccaatccaatcgttgatctttcgattttcctaagacacacggagccggtatatgaccactgcacaacctatcaccctcactattcgccgtcctgatgattggcatgttcactttcgtgatgatgacatgctaaaaaccgttgttccttataccagtcgttattttggcagagctatcgtaatgccaaatcttgttcccccgatcaccaccattgaagccgcccgtcgttatcgtgatcgcataaaagcagctattccaagtggcgataaattcgaaccattaatgacctgctatttaacggatagcactctgccatcagaagttgaacaaggttttttacaaggcgtatttactgcttgtaaactttatcccgccaatgcgacgacaaattctagccatggtgtttccgatatcaataaaatctatcctattcttagtgtgatggaaaaaataggtatgccattgcttattcatggggaagttactgcatcagatatcgatatttttgatagagaagctcgttttattgataacgtgatggctcccgttcgcaaacaatttcctgccttaaaaattgtttttgaacatatcaccaccaaagaagcggcacagtatgtcttagagggaaatgaatttcttggtgcaactattacaccacaacacttaatgtttaaccgtaatcatatgcttgtcggtggtgtgaaaccgcatttgtactgtttacctatccttaagcgtaatgtacaccaagaggcattaagacaagccgttgcatcaggccattcgcgtttcttcttaggtactgactccgcacctcatttacaacatcgcaaagaatcatcttgtggatgcgctggcgtgtttaacgcccccaccgctttagcagcttatgctagcgtatttaaagagctcaatgccctttctcactttgaagccttctgttcactcaatggcccacgtttttatggtttaccggttaatgaaggcactattaccttaacggaaaaatccgttactgcacctgcagaaattatgagtggtgatgaagcattaatccccttcttagcaaatgaagatattcattgggatattagtatcaattaatcattagtgacttgatatcttctttttatgcaccatataaccccttatctgggatagttatggtgcatattttttgctattcctcattgcacttttccattttccatcaaaatttagcttttttattgcgccaaatttcgtatactggaaagtaaccacttagtgggggcttctctcttagtcaaaaccggttgtatgattaggaggtattatgagtagaaaaaatgaagttattcaaacacatcctgttgtaggctgggatattagcactgtagatatctatgatgcgatgatgctacgtttacattatcttcctgaaaacgaacaccatccagacaatgcagtggttgataaaacactttggcttactactgatgtagcaaaacagttgatttatattcttcaagcaggtattgataaaattgaatcatctgaagattttgtatcagacaacaccaagcattgataaaaagataagttcgagaaaagcattaagacaccaagcaggagtactttcgtactcctgtctcgtttttattgttataatcacctttcatttttatttcgtttatctctattatctatccctaacatgttaatttttcatactgttttttttaattagttattgttataaattaatttatatttaattaagttattataattttctttttattcgatatatctttcacaaaatgatatataacccgaattgacataaaactatgttatctttattttaataacttgaaaatagatatcacaaggaagttattagtgaaaatattaattattgatgagtgttactttactcgtaatggtattcggcatttcttcttaaaaaaaaatgtaaggcatgaaattattgatatgtcttctattgaagaagctaatcattatattaataactctatgcctgatattatttttattgatctcactaaatattgtcgtgaagtagcacattgtcagcacttgcaatatttcttttcactgactcaagagtgtcgtttatacctctatattgatgccaactatccagacaaagatagacctatcgccttgacaaataactgttttatccttgctaaacgagtactaccttgggtattagagagaacatcaacattaacttctcgttgccaagtttttttccccacttataaacattctctttgctcaatatttagcatacaagaacaaaaaatcataaattactggatgggagagttgcctaactatcaaattgccaaaaaattaaaaattagcaatagcaccgtttattcgcataaaagacatattactgaaaaaataaatgtaaaaaatagaattgaactcttctttatatataatatattaaaatatatctatgagaaataaatacaaacttatcgtttaatgattgatatattttatggaatgaaattatgaagctaatagtttaattaattgaggaaataacaaactcctattacttaacattgaactctataataggattataaatatgggtgaacatatcaaaaattaaaaatatttaatcacctaagagcaacgttttataacataaaatatcttcttcatattcaatatgacactaaacatattaataagcacaatatgtcatagcatgactcacttcactcttacagcactcctagagtgaagtgagcaccaatagagtcatcaacaacaaaaagacactattgctacatactattaggcgatacgctcaatctttgccggtaatccttgacgtacagaggcaccagaaacccaatctaaccaagtattcgttatttctcgtgttggatcagcaaagcctaagtcgtttaagttaataccactacctattgctttatccatagctaatggttgcccatctaaatagtgttgacgtgagcctagctctttatgtccataaccatgttcaatcgctaacactccaggcataaccccctctaataaactaatttcagcctcaacctctccacctggggtcactatgcgcactttatcaccatgcttgatcccccattttttaccctctagcggattaatcgcgactaaattgcttggttttaccattcttaaacgttggatcatgcccgttgagctacttaccacatgagatttaaaggacatcagttttaatggccattgctcttgtggaaaatgttgatgtatatcgctaccgtcagataaacgcggtggataataagttgggcaaccactatatcgctcaccggtaatagcatgatgattcttcgctacattttcattccagatctgtaatggtttcttccattgcgggcctgtcgcatcaccattccatgctttatcataaggggcaaagcgcccaccacgagtataaatattcgccacccttaggacttcttcttcttttaaagtggcagtaatagcaggaagaatacgatcgacaccacttaataaaatatcttcatggctggcaggtgctacaggctgttcgcccataaaggcaatattagccgctacacgcagataataatcttcagcactattaattgcgtggaaatgcccatctttatcttctagcgcattttcaccaaagccgggtaagtctaatgctttagcaaccgcaatgcagaaagtttccattgatataggttgaccatcggctgttttcgccacacgaggctctacaatcggccaacgtgccgtactggctttgacttgtacaccagaccacggcgcactaaatccccaactttcaaagttatgcgtatcaggcacaatatagtccgccagtgcagtggtctcattcataaaagcatcgataccaataatcaatggtagatgctgtggatctttaagacgcgcttccataacttggcgaatacctgcaataccgtatagcgggttcgtcatattggttatccatgcttttaatgaataaggataacccgctaatgccgatcccagttgctctgttaattgccctgcggcaaacggataccacggtgctttagcaggataaggagactccccttttgcgatccgttcacggtattcatcagattgttcataggccgctttactgcgcgatagcaccattcctttaggcttaattttgcctttaaaactatccatattgtaacgagggccatctatcgcaccattaaatttacctccaccgacagataccccccctttcaggtttagatttccaattaaagcgtttagcatgatgacactccacgccgtatagaaaccatttccccccatcatgccaccatgtgagataaccgcagcttttcgtccgtagtcagtaaattcacgcgctaaggcaataatagtgctttcaggtactttacaacgttcactatactccgccaatgacatgcgacttgcagcttcagttaataattggaaacttgattttactgtaacctcaatacctgtttttaatgtcactttttgagtaacaaaaagctgtgctctgtctacttgcgtcgctgctgtaagctgtccattaagggctataaccatattttgcgcttcgccatcggcaatatcctcaagatgcgcggcggttaacatctgccctgacagtggatgattttcatcactaatgactaaatgtgtcgcattagtccagcttcgctctccaacattattcatcgacacttcactgggcaccgataaatactcagcattatagcgtttgttttcaatgatccagcggatcatacccatcactaaagcagcatctgttcccggttgtacgggtacccaatggccatgatcattagctaacgtggtggttaatggcaaagcaggtgccacaactacatagttaaacgaaccacgaatacgcgcattcgctaattggcgaccttgacgtttaaatggatttcctgattgcgcaggtgaggtacctaaaaatagtgcaaattcaacatgatcccaatcaggcttcacatgagcgtttttatccagatcattcattaatgcaccggagccggcacgatacgctaatccacaataagagccatgagcaccaaaatttttactaccaaaggcattttgtgcaaagcgacgaataaagctatctcggccatcatccccagcattagtaactaataactgatttgctttaggtcctagggctggctgtttaggatcaatgggtgttgctaaatcgcggatagcacgtaagccatcaacatgcccttcaccaaataaatcgcccccctcaaccacttctttgatcagttgctcaaagctaattcgttgccattttccctcacctcgtttacccactcgtttcatgggttcaagaatacgagtaggactatcgaggctttccatcattgtcgcaccacgagcacaagccgtagagcggttagctaaaccactttcgccccccattttttcaaaggcttcttttattggcatgttataaccaaaatggatatcctgagataatgggtgataaggatttcctgcaatacgtaatacttgattattgttacgatcgactctcgcacgcacaccgcactgagtccaacaaccaaagcattgagtcatacaaactgcttgattggtattaggttgccaattcgctttcgccgtgattttaccttctggtaataaagagttaccgttgatcctatccaaagtaaccttaccagaagtcccatcaacgagaccgtcgacagcacgcttagcaacatcgcgataactggcagcaaatgcggcaataccaccgataaccaatccacctttaagccattgacgtcttgtaaacttagccatgctgtactctcctgacaacccaacgaatactttctctgaatataatggttaacgctatccaaagcccaaatgttccaacaatcgctaataatccatcattacccagcgggaactgataaggattggtaataatgttatatttgggaatatattggcttcccattaacattagccaacgtaatacccacgccaatcccattgaaataaaagccattacggtaataaatgccactgagcgtgcctgttttgccattaatccgcccatagcaacagacactatccataaggcaataacccctatcgcactccaccagcctaaacttcctattgccaattgttgcctaatggcttgtcctgaaatagtatcccccgcaatccaaaaacctgtacatacagcaagtaacattaaagatccgataaaccacatagccagttcacgctgatacacaggctctcgtcgcgtacctaatgctaatagcgtaggcaatacttgcatggcactaaaaaacagtaatatcggcagccagtaggtataaagcaccggtcttgcttttaaaatagaagcttcacggccggtatagagcaataaacctatcgaggttagtgcgcaggctaaagcaacccaacgcgttaacttatattcacgtttccacactaaacgcacgaccacggcaataaagtacaaaatactaaatgcagagaagagtggcagtaatagtgatccccatgccatccacgaccaaggagttggataagcataaaaatgccaaacacgtgcggtttgatggagatcagcggttaatgctaaaggggcggtgatccccgccgtaacggcaataaaaaccgcaacagcttctaaacgaggattacctgtacgccctttccaacattgccagcatgcataaagtgttgcgcaacacgcaatgccgataaaaaagaaatattgaactgcccaaggtaaccaaaagtattcttgggggatcgctatcacttcttgaatttgcgaaacggatgaaatcatgagtgaacctcctgccataatgcgggttgcccttgtccaactaatggctgcacaaatgcatcatctaaaccaagataaaaaacttgtggcaaggtgccactttctggtttaagtacttttaattcatgttcatgctcgcggatcattttacttattgtgctgtgtggatctttcatatcaccgataatacgagcgccccccacacaagattcaacacaggcaggtaataacccaacttctaggcgatgagcacaaaaagtacatttatcggctgtctgagtggaatggttgataaaacgggcatcataaggacatgcttgcacacaataagcacagcctacacaacgttcattatcaatcacgacgatcccgtctttgcgttgaaatgttgcttgaacaggacaaacaggtacacacggaggctcgtcacaatggttacataatctagggagtaagacgttcgttattccctcttgccccttgatagcaacttgatattggtttactgtcgtcctaaattgtccttgtggcgtttggttttcaatcgtacagctcactgtacaagattgacacccaacacaacgacgcagatcgatcagcatgccataacgtttatcctctgagccttcacggcgctctggggatagtttaatgcctgcttgagagagaggaaccagtgaagcacctgcggtaaggacccctaattgttgtaagaattttcgtttaccaagatccatatttgtctccagtatcactcagtaaatacctgccacattgagcgaagggaatagaaaataagtatttatggcattgtaaaaattactgagtcctccacctattgtggtttaccacatactcggtgcgaacttgatccaaaacaatatttaacattagatagttatgacgataaaacagacaattgggataaaaaaaatcgctagtttgagcttattactgctcttttttctgctctcttcttctgcggttgccaaagagtggactattggtgtgttagcgttgcgaggcgacgcctcaacccaaagacattggcaaccgcttatcgataccttagatcaacaaatacccacagatagctttctgctgttaccacttaacttgtcagaaatgaagcaagcagtggcggacaagagagtagattttctattgacgaatccagcgcaatttgtccagcttgatagtgcatatccgctacgttggttactctctttacgctcgggttatgagccggataacacaacaagaaatgtgattggtagccttattttggtgcgcaaagacagcgcaattacatcgattcatgaattagtcggaaagcgtgttggcgccattgcaccagatgcctttggtggatatctgttaggttacaaagcactgcgtgaagaagggattgatcctgagcaggattttacattacgttttagtggttttccggctgatgcgttactttacttattacgtgatggcgatattaatgcagcgatcatcccagtttgcttattagaaaatatggataacgaaggtcttattaataaagaagattatcgtccattattaaattattctaccaatacttcttgtttaaccagtactccgctctatcctaattggtcatttgctgcattagatactgttcctgacacattagtggataaagtgacacgaacattactcaatgatgaaagcgacaccatgaaatggggggcacccgcttctcattctcaagtggaaaatttactccgagaagtcaaccaacacccaaggcagcgacaactttggcaagatgcgaaaatttgggctatccagcaccgttttattatcggattatcattgggtgccattatcttactggttttcaaccaaatctggattagttatttggtcagaagacgtagccatcaattagaacaagcgcatatccatttaagagagcaaaaagaggcattagaacaagctcagcgtttaaatattttaggtgaaatggcgtcaggctttgctcatgagcttaatcaacctctttctgcgatcaaaagttatgcccaaggtagtgcgatccgcctagaaaaagagaacaaaaatcatccattactccccgcgttacgacagatagaccaccaagcccaacgtggcgcagatattattcgcaatctacgtttatgggtaggtaagcaatcagcaaatagtgatacagtgccactgtcagaacaaaatgttgcccaatgtattgaacatatttggcggttattacgtattgatgaaaaatatccacaagtgactctgatcactaagattgataaacatgataccctatacttacctgaaacattattagagcaaatattatctaatttgatcaccaatagcctacaggcgggtactaaagtgctacagataagcacccataaagcgcctgataggttgttaattgtgatcaaagatgatgcgggaggaatgagccatagccagcttgaacaacctttctccccttttcaaaccaccaaaacagaaggtcttggtttaggtttggtgatttgccaacgcttattaaattcacaaggtgctgatattcacatagaaaatcaaaaagataagcaaaataatgttggattaaaaatcacccttattttccccaataacaataattagaggaagaaaaatgccaacaattcatctggttgatgacgatctcgccgtcaccgatgcttgccaatttctattagaaagcttaggttatgcggcgcaggtttggaatgacagcgaatattttctccataatattgacctttatcagcaaggggttgtgctgttagacatgagaatgcctaaagcagatggtagacaagtacatcaatatttaattgaaaaacacagtacgctagcagtgattttcttaacgggtcatggtgatattccgatggcggttgaagaaataaaaaaaggtgccattgattttttacaaaaacccattgatagcaatgcattactctctgcactgaaatccgcctttaccgaaactgcaacacgctttacggctgatgatatccgtcgccgttatgcctcactgacaccaagagaaaaagatattgcatattatgttattcaaggcctaatgaatcgagaaattgctgaaactgcctgtgtttctatcagaacagttgaggtacatcgagcaaaagtgatggataaaatggccgttaaaaatatcgcagaattagttaccgcattacaaggaattgatattgtagcgccaaatttatgacaaaatttctgatctgcggtaaaaagtgtcacaatatagaatattcattggaaaaatagtaaatagataggcttatgataaagtcacctccatttaaaacatcatttttacagcccaaatattggctgacatggttggggataggattactctatcttctcgttctgctcccttatcccgttatctactggttgggtacacggctaggtcgtttatctaaagtctttttaaaaaaacgtgtacaaatagcagaacgtaatcttgagctatgttttcctgacatgcctaaaaatgaacgtgaagcgttagtgaataaaaacttcgaatccgtaggtatggggctatttgaaacaggaatggcttggttttggcctgattggcgtgtgaaacgttggtttaaaatcagtggtagagaaaatattcaaaaagtacaagaaactggccaaggtattattgtcgttggtatacactttttaactctagagttaggtgcacgtatatttggcatgctaaaccccggtattggtgtgtatcgccctaatgacaatccagttatggactggttacaaacttggggtcgtttgcgttctaacaaatttatgttagatagaaaagatgtcaaaggtatgatccgcaatttaaaagcaggagagatcctctggtatgcccctgaccacgattacggcccacgaaagagtgtctttgccccactttttgccgtagataaagcagcgacaacaacaggaacctatattctagtcaaaaccagtcatccggctctgatcccgtttacaccaaagcgcttacctgaagcaaaaggttatgaactgattatttcacctgccgtagctgattttcccatcgatagtgaagaaaacaccgctatcgcaatgaataaagtggtcgaacaagaaattttacgtgctcctgatcaatatatgtggttacaccgtcgttttaaaacccgcccacctggagaagcttctttatataatgagataaagaaagtacactagtccccatcagtgactgttttaataaaaaaacagtcactgacaaacagattgactctcttaaccaagattaaaatacaagactaaaataataaaattagccatactcactactattatttcctgcaaataaacacattataaagcactacctatcgttgttattttgtattatggcgatattcttatttaagaatagataaccaacattgagataaaaaaaacaacgcaaacaccattattctcactttatgtgcttcgtttacattcttagataaaggagtgacatgaacctaaagccccgcaacaattcttggaaacaaaatctctacattgtctggtttggttgttttttaacgggtgccggctttagcttgattatgccttttctaccattgtatgtagaagagcttggcattaaagatcatgagtccttaaacctatggactggtgtcgcttttagtattacttttctcttttctgccatagcggcacctttttggggaaaattgtcagatagaaaaggacgcaaattaatgctattacgttctgccttaggtatggcgatcgtcatggtactcattggttttgctcaaaatatttggcaactattaattttacgcgctttattaggggtattagggggttttgtgcctaatgctaatgctcttatcgccacacaagtgcccgttaaaaaaagtggttgggcattaggaactctttctacgggtgcagtaagtggcgcattaattgggccattaattggtggaatacttgccgatctctacggtttacgtccggttttctttattacagccgcggttttatttatctgttttatagtgaccctattttttgttagcgaaaattttacccctgtttctaaaaaagatgcattatccacccagcaagttttttcatcactcaaaaataaaagattagtcatttgcctgtttttcaccaccatgattatccaagtggcaacaggctctgttacgcctattttaacactttatatccgtgatctagccggctctatcagtaatcttgcctttattagtggtgtgattgcatctgttcccggtattgccgctttaattagtgcccctcgttttggcaaattaggtgatcgcataggccctgataaggtgcttattttcacattgggtttatctatttttatgcttattccgatggcactcgtcagtaattattgggaactaggcgcattacgttttttattgggtgcggtaaacgctgccatgttacctgcggtacaaacgcttattttatacaatattacgcctgcaattgctggtcgaattttcagctataatcaagccttacgagatgtaggaaatgttactggaccgttaatgggcgcgtttgttgcggccaattatggatttagagctgttttttatttcaccgctgcggtggtattttttaatcttatttactcatggataagctttcgtaccccgcaaagaaaatagtcaaaaaatccaccaatagatttagttaatagttttttttcaataaaaaattacactttctctcttaaaggtctaattgttaatttttttattttatttttcataatttattgtttaataagaaaaatatttacacaccatgtttacacctctttactttttcttgtccttttttttcaaaaaattgcaaggttaactattgcaaaatgagatttttatcgacttttgcactaaaaaatggtttataaagtattaaatatgcttttagtcactgaagttcactaaaagtgtgttaaaaatatattaattaaatgtagtggcaattgataacagaatgaaataattctgtattgcctcctactgatattttgttctttttacttgcaaacgacctgcaaaggttttttttgggaatttaagatgcaatctactcactcaaaatcaagccgaaccttttttggccatccataccctttaagctctctgttcttcacagaaatgtgggagagattttctttctacggtattcgcccattattaatcctatttatggctgcaaccgtttatgaaggtggtatggatattcctcgagagcaggcatctgctattgtgggaatttttgctggtggtgtttatttaacatcattgccaggaggttggctggctgataattggttgggacaacgtcttgcggtttggtatggctctatctttattgcattagggcacctttctatcgcactttcagcgttttggtctcagaacctattttttatcggcttattgcttatcgtattaggtacaggcctatttaaaacctgtgtcactgttatggtgggaaccctgtataaaaaagatgatacacgccgcgatggtggtttctccttgttttatatggggatcaatatgggctcatttatcgcaccactgatcaccggcttcttagtccgtgattatggctggcattggggctttggtattggtggtattggtatgctagttgcactactgatcttccgcttttatgccgtaccgacaatgcgtcgctttgataaagaagttggcttagattcaagttgggatcgccctactgttgtgcgtcgtaatgtcggacaatgggtattagcacttgctgtgatattaattgccattgttggtttaattatttcaggcactattccatttaatccggttattgttgccaattttatggtttatgtgatctccggcagtgttatcgcctattttatctatttattcctatttgcaggattaagtagtagtgaccgttctcgcctgtttgtttgcttcctattattagtttcagcggcactgttctggtctgcattcgaacaaaaaccaacctcatttaacttatttgctaacgactatactgatctaaattttatgggctttgagatccctgcggtttggttccagtcagtcaatgcgctatttattattattcttgcccctgtatttagctggttatggccaatgctagcacgcaacaatatgaatttaagtagcatgagcaaatttgtgattggtattttattcgctgcaggtggctttaccgtcatgatgtacgcctctgaaagcgtgcttgcaacaggcagtggtgtttcaccattatggttaatttccagtattttattgctgaccctaggtgaattatgtttaagccctataggacttgcgacgatgaccattttagcgccagcaagaatgcgtggacaggttatgggcttatggttctgtgcgagtgcattaggtaacttagccgcaggtttaatgggtggaaatattcgtcctgataaacttgatgttatgcctgatttcttctctcacgtctctatagcattggttatttgtgccgttgttcttgcagcattaattattcctgtgcgtaaactgttacaaagtgcagatgataaagagaatgcgcaagcataatgagttttaggtaacatttttcaccctataactcaactacgctcctcaaattagacacttctactctaatttggggagtttttttataaaattgaaatatacacatacaccacaaatattagaaataaagaaaatagatctcacagctctatgtcctgaaagtgacaataaaaaatgatatcatagaagcgaaatttacgagataatgcttcaatagaaaattttcgttctgcttaaaatggagtcttttaattaaataaattaaaatatttaacttttaaagactattcaataagataggacaagccatatgctaaacacaaaagaaaaaaacatattgagaaatatagaaaaaagtgttttatgtaggaatataaaatttaatataaagtgtaatttacaaaccactttctttacaatagttttctctcttttctttatttttagtaaaagtataactcttacactacaaagtaaaatatcaattagcttattaatcgttctatttgtatatttatttggatcatggcattcattccgaaatataaagctagcaacaaaattgacaattatatatataaaaataaaattaaaaaaactcgttaataatcttagctcttcatgaaaattaaattaaccctgtacagataaaactttcctcatcgagttgaactaacgtttactaagagtttgctacctcctacttcttatttttacttccagccactttttatcactgttttgctctgctaaattgtttcttcttcctctttccgattaaggtactttatgaacacgcttcccatttattatgttaacgcttttacttcaacacctttttccggaaatccggctgcggttattttgttagataaatggctacccgatgacacactacttaaattagctaatgagattggtttacctgaaacggcttttttagttgccaatcatattcgctggtttacgcctaaagtagaagttcccctatgtggacatgcgactttagccacggcttttgtattaaaaacgattaacaaagcacctgcgacaagctttaaattccattctctgtctggagagctcacggtatcttgtcactcttcaagttttactctcgattttcctcaagtacctgcatcattaaatccaactataaaaccatcattagaagcggcactaaacatagatattgaagaagtttggcaatctcacgacagatatacctgctttgtggctgatcctaacaaggttattgattatcaacctgactttaatgctataacacaactaccacttcccggtgtaatattgaccgcgaaaggtcatgcgccttttgattttatttcacgcttttttgcaccacgtaaaggggttaatgaagatccggtaactggcacttcacattgtgtattagctccaatttgggcaaaaaaattaaacaaagataaattaaatgccagacaagtttccgcgaggggaggcaatatacagtgtgaactcaaacaagagcgcttattgcttactggtgatgctgtactatttttaaccggtgaaataaccttttaaaattaaagaggaatatcatctattcctctcctttgctttcatttttctctattttatactttaggatcatccctactgtatagaaagataaggttttattatgtccacaacggatttatctctagagttgcaagataaaattaaacactcaatcacccgcgtctctaaagttatttttccaaccacgaccaatcatcactccacactctttggcggaacggcattagcatggatggatgaagtctcttttattaccgctacgcgcttttgccgtaaacgtttagtgacagtttctacagagaaaattaattttaatcaccctattccctctggcactattattgaattagttggtgaggtaatacgtgtcgggcgtaccagtctaacggtaaatgtttctatttttctcgaagagatgtatgccgaagggcgagaagaagtgatccatggccaatttaattttgttgccgttgatgagcatggtaagccaacccctttattcgataaaccatcgcttttataaccgctaatctgtcgttttattcttcaaattaaaaacgacagattttattatgctgtgggttaattaatatcgtccgattttatttgatcagataaatctttgtggatacttttcaatcacatgaaaatatcaaataaaatcaatgggtaaattgattactcacatgtaaagcaagagttatccacagttaatgtggataacaagaaagacgttgcaacaactttagccgttaaataacacaaatttttatcacttcaaattcaatttggcatacagtcaactttgcccccgtgattgcactttcagccatcactatctctgttgatgattgataacgccgacacacctctagagctaattcaatactgggctcaattaataaaatagcgccgatattttcaaccgtcgtcggaaaatcactctctgaggagatggtatagagtaaagattgctgatcttgggcaatttgttgcgctttatctgttgcggcttgattaactctttgttgtttagcggagtcaccgccaccagaatgcagatagatcatcgcttcctcataaaaatatcaataataattaatttttgctatgtaaacaccccatcaatatctgtcgatataaaggccgtttatatgtaattagataagacaatggtagtcaacaaaaagcctttaataacaatattattaaaggctttagttctatttcatatcttggttatattgcgtatgagcagttaacagcttatcaattgaagcttggcataaataaggttttaatgcggcaaactttttctctgaccaactataaatatttaaagataaaagttgctctatcacttttggttcaaagcggtatttaacatgcttagccggtattccaccaacgatactataaggagcaacatcttttgtcactacactatttgctgcgataatagccccttcaccaatagtaacgccaggcataatcattgcccgcatacctatccatacaccatcgtgaatataagtatcacctttaccaatataggcttctttaatattgtctaaaaatggataaagagaaaaccaatccatacgatgagtatgattgccccccatcaaaataaccgcttcagcaccaatacaaacatagtcaccgatatataatttatcgatttcccataaaggttcccactgaaggctaaattcatcgccataaaggtaacgcactacagatgcttcaaagccattatcccaacaatcactgtaatagctatgctgacctttaataataatattcttattttttactgtttcgtgtaaatattcgacacgtgaccaatgtttcgtgttcatactatgactcgctataaattaatgagccatcaaagaatgctgtattctttgatgatgtgtccgcattccaaaacacatcatgactaagcaatccgtggttgtaacaataacggattttgaaccttatccattccttacactccttcaccattattatgaatatctataataatgtgacatagaaaaaccacaaagttgcaacttgttaactatttttccagcaactctgtggttttaaaaatacattatcttctagctatcaactatgctatttaaaaaaatctttactaccatgtggcgcacaacgcaaatattgcggagcgactttaatggtctgctttaatttttcagccgcatgccaaggccaacgaggatcataaagtattcctctgcctaatgcgataaaatcagcttgttcagtcagtaaaatagcttctgcttgctctggctctgtaattaacccaaccgcaatcacgggtaattgtgtttcattatagatggcttgagcaaaaggaacctgataattaggtcctagcttgatggcttgtttgtctgataagccaccggaagaaacatgaatatagtggcaaccgagatcttcaagatgttgagttaatgcgatagaactttccagatcccatcctccctcaacccaatcagtcgccgatattcttactcccacacacattttgtcagagactgcttttttgactgcagtaaaaacatcaattaacaagcggctacgattattaaaatcaccgccatactgatcggtgcgatggtttgataatggtgataagaattcatgcagtaaataaccatgagcaccatgtatctcaataacatcaatacctgctgactcagctcttttagctgcttcaacaaatgcgttttttatcttttcaatctcatcaattgttaatgcttgaggctgatgatattgaccaaaagcaatactagaaggtgctactttttgccagccattctcatcatcaggagccaatgattttccaccttcccatggcaaggatgttgatgcttttcgccccgcatgagccaactgtatacctattttagcattagtatgctgttttatatcgctaataagctgttttaatgcgcgaccatgttcctcagaccataatccgagatctttataactaattctacctcgaggctctaccgccgtcgcttctataatcactaaagcggcacctgataatgctaattgcccatagtgcattgtatgccaagatgtgggtattccatcttgcgcagaatattggcacattggtgcaacaataatacggttgtctaattgatgaggtcctaatttattaggcgtaaataacaaactcatgcaaagcctcctgctatataagcaatgagacaaaaatcatttttatcttatggttacgattaaaaataattatttgccctctatctagttttaaataaaccatcactataacttaataaggctaacgcattaaatgacataacgcgataacctatctcacagtgtgctaagaaaaacagacttcaatggctgatcctaatacaacatctaataaaatagcggtattagatgccatattaggttataacgcattataggatatgaaatattaatgtggttttactaataagagtgatagctttcttgcaaagggtaaaacgaataaaacggttggaaacgcaatcatccaagataccccccatgaagagaaccaaggtgcaaacataaggctatttaagcccattgtttttgctgtactaataaaagaaacaatgccacacatcacaaaagataggaaaaacggaaccagaaaaatcatggctcttggtggcaatttaggtatacccaaaatattatttttatcttgaaaaaacatagaaaagaccccaatagaaacgtgtactacggcatataaccgccaatacaacaggcgaatacccataaaggtaaaaaaattaagttatatgcgttgattaacgtaaacgcttacgagtcttgtagactagaccgatgctagtatataaatgaaagtatttttgtcaagtaaactattatcattatcatttgataaaaacaatagaactcatgaataacttaagtgaatctttatctttcaacagaactacaccaagggtaaaacattattactcatattttgagttaattttttacccaatacattttatcggtgaaatgctccctgaggaggggagcatttctgacacagaacgatttaattaatattaaaagtgatcatctaattgcatattaattccttttaataacagtgtttattccaattaaattgcataattttatttagaatattgaaatgtatagggtaaataaattaattaactctgatacaacacacttatcttactatattgttttttatctaatagtaagaaaagatcgcctcttatctcatattcaatatgataaaattatattttcgatattatccattttcatacaacatatttattatctgcttatttataattaatgcctttattttctattattaatagaattaatattatcaatttacgttaatgcattactttctatgagttaactctttggttatattgaaatttaaaacaatacagttcatcaataaatgtcatcatcatcataaaagcaagtatttatttatcacctctacaaaagatttatgtagaaagtgattattttattaattaaacaccttactttcagtaaaaatacatatttaataatatattatctaatattaagagttgattaatcacacttagctttatcttttattatattgctcaaactttatttgccttttatactttcttaaagcatattttgataggtgttattatgaatattttattagttgaagacgatctgcaattgggaaaggcgctctgtcgtggtttagaaattgctggttttcagccctgctgggtaagattgcttgcggatgcacgtgttcaattaaaccaaaaagcctttgatttaatgttgcttgatctaggtcttcctgatggtgatggtcaagatgagcttatcgcactaagaaaaagtggtgaaaaaatacccattattattttgacggctcgtactcaaatagataacttagtacaaacattagattcaggtgccgacgatttcttaccaaaaccttttgctatgcctgaattaatttctcgtgtaaaagccgtaagtcgccgtatggccggtttctcttcacagatttggtctattggtgatttacagcttaatccctcgaatcatcaagtcactttaaatggtgaactattgttattatcaggtaaagagtaccagttattatatgagctgatgcgcaatacagataatgtagtacgtaaatctgatttagaacaacgcttatttggcttagatgacaaaattgaaagtaactcacttgaagttcatatgcacaacttacgccgtaaaataggcaaagagcgtattattacggttcgcggtatcggttatctcttaaaaaaagaagtgaactaaatgaagatccgctctttctttatttatactatctttctacaaacgatatctatcgtgatgctatggggcgtttggttagcttggatagaatttgattatcttgctgactttgaaactatctacaataagcaacaagaaattattgctgaaggatttgccaatacactcgaaacggtttcctctcaacccgagacagtaaaacagatagctcaccatttacaaaacatgtatatcgataccatgcttaatggtgaagatgatgatttacactatttaccttggtttattgtcttaaataaagataatgatctgatttataccaatagaccggaactttctctgcctaaacgggtactatcgcttgcctctgaaaaaatctctgtggctggggagaaatggtatttatcttatagttggggaaaacaacataaaattaaagtttttattggtgaatccgtcgaagatagaggacatgtcattggtaaccctatttccggtacttttgtgcccttcctatttattttagcgacagtgatcttggctatcttaattactgcttattttagtttgcgccctttaagacaagccgcagagctgatttctaatcgaaaacctcgtaatttaacgccaattaatgtcggacaacaatttaaagagatccgccctatctttaaagagcttaaccaattaatggcaagaatagatgcggctaatattagagaaaaacaatttatggctgatgcggctcatgagctaagaaccccgattgccgcagtgattgcccaattacacattctctctttagtcgatgaaaagcaggagcgagaagaaattattgaagatatgaaacaatctctggatagagccgccgcactttcccaccagcttattgatttagcaagattagagtgtgacgatttccctataaaaatagaaccctttgatgtttataatattattggtaatgctattgctcagcgcgtgccttatgccttaacaaaaaatattgagctatctttaaatgaaggtatgtcacttaaaatagaaacagataaacaagcactgctgtctatttttaataacttattggataatgcaatcaaatattgccccaataatagtcaagtcgaagtgactattgaacataaagatacccatcatctcaatattattctgcgtgataatggaccaggaattgcacctgagtatattagctcactattttcccgtttttatcgtgttccgggatcacaagggacgggcagtggtttaggcttatctattgcacaaaatctcgctgaaaaaattcaagcaaccatttccattactgaagggctacacaataaaggtattggttttattattaccttaccgttaaaaattaaaccactagataacgagtaaatatattgtaggaggcctttgcctcctataattttagttaaaactattagttatgcttatccccacaaagtggctatccaacgtagcatcgcggtaataatagcagcacttaataccaccaaaataaaaggtttctttttccaggttaaaacgcccgcaacacccacaccaataatcttggcaatatcagcgagttggtcaccatcaaaaaaagtagatgtcattgcaaccgaaaataagatcacaattgccgaaagtgaaaacatttctttgacccgctcagacatccccgttttattatttaataagataccggagatgcgcatggcataagttcctacggctaaaatagcgatacctgcgataagtgaagttgttgagatcatatttttctcaccacaaataaaacgcctaacaaggataataaaactggtattcccgcagggagaaacagtgtcgttgctaaggcaatcacactaccaataatagcggcttttcgtgttaatttatttttcaatgccggtaaactcagtgccaaaataatcgctgggaacatcgcatctaaaccaagcatttttatatcaacaataaaagagcctaaataaacacctagcatagtacctaacggccacatcagtaaaatgcctaatccacaagcccaaaatgctaatctattttgctcagcagtcgattgagataacccaaaaaccacactttcatcatttaatacatgaaagcctaatagtgatttaatcccttttccgggtaactctttcaccgccatactaaaagggatgtgccttgcattgaccattaaaccagcgagtgccgcatagatggcgcttcctcccatcgcaaccactccgataaatagaaattcagaagcccctgctaaaacaaaaatcgataacgaaagaggtacccaaaaatcgaaaccttgagtatgagctaaagcaccataagatattccaacgatcccatccgctaatgaaacaagcagaatatctctaagtacgttattatctagacgactgttaatatgcataaaaaacgtattatttattgaacgatttgttcattatgttgaacgacatatttttttgcaagctgatttttgaaggaaactataatgtcatcaccttcggcacccattgaaattatttctcaatccattgctagagaaagaaaaaaagcaggtctttcacttgcagaaatcgcaaggcgagcagggatcgccaagtcaacgttatcccaattagaagcgggacaaggtaatccaagtatcgaaaccttatgggctatttgcgtcgcactcaatattccgttttcacaactgatttcctcacctaaaccagaagttaaagtgatccgcaaaggtgatggatttaaaattagtgcagaaaaggcctattaccatgcctttttattgtcatcttgccccaatggcgctaagcgcgatatttatacggttattgctcagccgggtaaagatagagtatcagatcctcatagtaaaaatgtcacagaacatattcttataattagcggtcgtgccattgtcggtactttagataatcaacaagagttatctcccggtgactatatttgttaccctggtgacgttactcatgtgctacgtgcattagagccagacactaccgctgtcatgatcattgaacatcacaattagtgacaatggtattatcgcactgatttttcggataacgtcaaaatcagtgcaataacaattcactatggtttaacaccagctttctcaagataaatttctcttaagcgttgtgataacgcccctaccttaccttgatttattttttcattatcaatggagatcaccggccaaattaaagtggtcgctgaactaataaaagcctctttggcttgtttcgcttcttcaagtgtaaataaacgctcaatgatggtgagtttttgttctttggctaactgaataatcgcttgtcgcgtgatccccggtaaaatatcttggcttaatggacgagtgataatttcatcttgctgattaacaataaagaaattacttgaactcccttcggtgatataaccctctttgataaaaatagcatcatcagcaccttgctgatgcgcatgatgttttgctaaacaagcagcaagtaatgccaccgttttaatatcacagcgttgccaacgaatatcttcaacacttacgacagaaatccctttgcttgcattaggatgatttaccaccgttgagtgttgaacaaatagcacgagtgtaggggcgactaatgaagacggaaaatcaaaaaaacgtgatgaatcggcgccacgagtaacttgtaaatagataagtccttcatgtagatggttcttatcaattaattgcctgtggatctcttttaattgctcttttgttagtgaaaaaggcattgataatgctttacaagagcgctgtaaacgttgaaaatgcccttcaaaatcaattaattgcccgttaataacggcagtaacttcgtaaacggcatcagcaaataagaaacctcgatcaaaaacagagatattagcttgttctttaggtacaaattggttatttaaatacacaatctcagacattttacctccgtgataaattgtattaaccttgataacttttcaccacactactctttcacattactatttcaaatgctactgactttctaatacaaatctttaatggcctttttctttaaagaattcctgttatatagctaaaaattgctataatttgcgataaggattacaaattaagaggttgttatgttagacattaataaaaataatttatctcagctaacagagaaactcgttaaaaagcagtgtactttaatgagtatcattgccgtgctgggattacttgcgggtattatctgtattattaaccctttttcttcaggggttgtggtcagcgttttcctcggtatcgttttttttgcttgtgcaataaccagcataatggcggcctttaatagccggatctcttctggttggtcgatgttaattactttacttgctggttttatctatctatttttaggctatatttttattaccgatccactaaacggcatgttaagtcttgcatttattatcggttatttatttatctttgccggaatactccgcttagtactcggctttaagcaaattaaagatagtttttatggctggtttaatattctagtgggctttttagatcttgttttagcctatttcttactagcttttggccctgaaacttctataacactggtgatggcattgattggtatacaacttattttaagttctattactattctatcaatagccagtgccatcaagcggatgactcgttaatgatgtcttacgtttaatttgttatttaaatttagagccacacaatgtggctctaaatcgtaagcaaaaaagttgtatattaagcacaaggtaagcgtagagaaacggtatacatattttcaccacataagtaacagttgccatttttctcaaataccatcacctgaatacctaattgtcccacttcgatatttggcaatgcatccgccaaaatactttctaatgcaggctctgatatttcaatcatacttatcggctcattgcttggtgtagtatcttgcaggaaatcacctaaacgaggatcatcggcataaatttctaatgtagaacgataaaccaatgtccgctcactgctattgactttagtatatccattaaagattataaccattttttggatatccaattttgcaacacggtttttaatttgtaagcataaagaaggcacaagccgaatattgacagaattaaaataacgatcgcaaatttgcggaatagtgacgctaatacaaggcttcggtgcaatatttttaatttgtttaccgcattccccagttaaggaattatccacaataatacgttcacggcgtgaaaaacaaatattgttaaaaatatccacagtgaagaaagagatataatgaacgccattcgttaaggcttgattctctaacctgaccgataccgctgatttatcagtacagggcaacattttaagttgatcattaaaatagaaccctacttgtgtactttcactaatatcacgacctaaaattaggttcgcatttacacagtaattttcactatgatagcttagaataccatttagcgttgcaggaaccttaggagacggcaacttctctgtcgtcatttcaacataatagtttcttgatttgagtgggttatctatatcttcactgttttctgattcagcataaaaaacagcaatctgctttggctcggtacctttaaatctaactttaaagtttgcaataccatatttattggtttttgaaatattgcttaactcaccttcggaattataaatttcaggctgagtaagtagtgtgctgttgtctttatcgtaaactaatgtgacctccttgttttgcatatcttcaccttcttgattttgaaggtgtaccacaaagcttttagatacctcttcccatttgctcggccattgcatagattcagagttgattgtcagtaaatcatcaaacctctcacaattagccgctgagcaatcggtattagggatcgcgggtgtcactcgaatttgcaacggcggggcataataggcattatcttcattatcttcatctcttagaatcaactgtaatgaagccactccactacgattgccagttaaagagatcttcgttttatggtcatcaacgatagtggtataaacatctttgttgttgggtaaaattaaaattcctttaggatttgtactccattgagccaaacgtaaatcactatcttttacctctacttcatagctaattatcccgttcatttttacttcgttaccaggctcatctggcgaagattttatttgattatatttaatctctgtaactgtatttttatcgggatctgtatcaggctcatcagcttgaggatgaacaggcttaggtggtgtttttgcggtatccttgcagttttcagctgttaagattttttgtaaacgttcttcttttgtttcgatagtcatcgcgtcatttcctttctttgctaagttccatgttcagcttaaagaaaaaaaatgcagtgaaaatcacaatagaaaaaagtcaactgagtattgctgatagggaaaaataaaaataattataaaacaaagagatagatataaattcaaacgtttttaagctatggttaccaacaaaaaatgctttcaatataaaaaataatttaaaatttaaaatatttttgtataaagctattgactgttatgaaaatgtgattagaatcagtatcagaaaatatttgtgacgagaatcacattttattaataggatacttaatatgaaatcaatgacttcttttattactcatctgcaccaagttgttgttaaattatcttcaactcgtttattgtaattctttgtattaaaaagaataactaagcataaagccagaaaatgcactctatatcgcaagaggcactatctggcttttattttctatctctttgattttttcttatcttactcttcgcgcatctttagtaacaaaaatttcacttgtttgaactaaaatccctcttcttgtaccctagtattaaatcaccttttatgatgaggatagtttatgcagcagcaactgcttacatggatacgtcagtttaatgaagagtacgctcaaatcacttctctgttacttgttttattgatcatttttgttgttgctcttgttctccactttattttgcacaaacttgtgctccctaagctttcaaaagctatcagtaaatacgatcaaaagtggcaactctcttttgaaattaataagttattcagtcgatttgcctttcttatccaaggtgtagtcattaatatccaagccttattatggatgggacccggtaagacacaggagatattaaccactacagctcaagcatggtgtttacttttcggtttattgatgattttctcaattatggatctctgtttgcagatcatgagaaattccccttcttttggccgattaccccttagaggtattttccaaagtttaaaattagtcgccagcgtgctgattggtatcatgattgtttcattactgatcggtaaatcaccgcttattttattaagtggtttaggtgccatgactgcggtgttgatgttggtatttaaagatccaattatgggacttgttgccggtattcaactctccgccaataatatgattagcttgggtgattggttagaaatgcctaaatatggtgctgatggtgccgtagtggatattagcctcaccacagtaaaagtacgtaattgggataataccgttacgaccattcctacttattctttaatttctgattcgtttaaaaactggcaagcgatgacacaatcaggtgggcgtcgaattaagcgcagtttatctcttgatatcaatagtatttactttttagatcaagagaatattgataaattagaaaaggcacagcttcttgaaccttatataaaaagcaaagtaggtgaaatctccagctataacgctagcctttgtcatgagcatcaaatgccacttaatcaacgtggtatgacgaatgtcggtacatttcgcgcttacgtggaagcttatctaaaaaatcatccgaagatccataaacagatgaccattatggtaagacagcttgccccaacctctgaagggttacctatcgaaatttatgcctttaccaatacaaccgtgtgggtagagtatgaagctattcagtccgatatttttgatcatatattcgctattcttcctcagtttggtttacgaatacaccaatcaccaacaggtagcgatgttagagcattaaaattccctaccaatatcgacacaccatagccctagcgttcattatttaaaagggagattaattctcccttttttctattaaataaattaacaaatatttataactaacgactttgttatcatattaacaatcttgttttaggctatttttttaaaatcgatatgttattttttatatatcgaatcactgtttccacctatatatttgatattttatttaccactaaagtggtattaaccgcaaaatgtaaccaattgtttaataattatttttttagataaccttattaacattttttatattgatataaatcattataggtataggtgtaataacttaacatagatatacaactttatttgttgtgaaaaatgttagggtaatgtcaatgtcaaaaattaaaaataatgtttctatcactgaaatgagccggcgtggcttcattcagtctgcagctgttctttctggcgctgctgctgtagctggaacggtatcattacctttctctgctaatgctcaaacaccccagggtattcgtcctgatgagacgtctgaaaccatcaaatacagtgcatgcttagtgaactgtggtagtcgttgcccattaaaagttcatgttaaagatggcgtgatccgccgtatttccaatgaaaccatgtttgatgactcaacctttggtcttcatcagatccgtccttgcttacgtggacgttccgttcgttggaaaacttataatccagaccgtttaaaataccccatgaaacgtgtcggtaaacgtggtgaaggtaaattcgagcgtatctcttgggatgaagcgacttcgattatcgctgataagctaaaatatactatcgatacctatggtaatgaggctatttattaccaatatggtactggatctaccggagcgaatttacatggtagaacagcctgtaaacgtctattaagtacagtcggtggcttcttaagtgactacggtacttactcttattcacaattaaccggcatcgtcccttatgtgtatggtgatatgctggaatctctgttaacagaaatcgaaaactcagatctggttgtgatgtttggtcataatcttgctgaaactcgtatgtctggcggtggtcagttctatgaaacactgaatgcgttagataagagtaaaagtaaagtaattattatcgacccgcgtcgtactgatagtgtcacaacattaggtgcagagtggatccctatctatccgggtactgatgctgcattagtggctgcgttaggttatgtgatgatccaagagggcatcactgatgaggcatttttacgtgaatattgcatcggttgggataaacaaactctgccagcctcagcacctgaaaatggctcttacaaagactatattctcggtaatggtcctgatgggattgctaaaacccctgaatgggcaagtcaattaaccggaatttccgttgcacgtattattcaattagcacgtgaaattggtaatgccagagctgcgtggatctcccaaggctggggtattcagcgtaccagtaatggtgaacaagcttgccgtgcaattatgatgttgccattaatgtctggtcatattggtcgtcctggtactaataccggatgttggggcggtagcattgaataccctgtcgcaagttttgccataccaaatccagtaaaaacccagatcccaacgtttatgtggtctgaagcagttgctcgtggtgaagagttaaccagtaaaaatgccggtgtcagaaataaagataagctggatacgggcattaaatttatgtggtgttactccagtaatgtgattggtaaccagcatgctgatctcaataaaacacatgaattactgcaagatgaatcaaaatgtgaatttattttagtgtgggataaccacatgacaccatcagcaaaatatgccgatattttactgcctgatgtcactactgtggaaactaacgatcttatcaataactcttatgctagtggtgcgtatcattatatggtgcgtttacaaaatgccattgagccgttatgggaaaatcgtcctaactatgatgtattggcagatatcgctgaaaaattaggtgttaaagagaaatttactgaaggtagaacctaccaagagtggattgagtattgctataaccaagtaaaagcaaataacccagcgcttccttcttttgctgaaactaacgatatggggattgtggatagaaaacttcctcctcgtagcgcttatgtggcattagaagcatttcgccaagatcctatcgccaacccactaaaaacagcatcaggtaaaattgaaatctattctgagaaattaatgcaagacactgaaggttggatcttaccagaaggtgatcgtattccagcaattccagaatattgtaaaaatgaagaaggtgttgaaaacgttaccttaaaagagaagttcccactgcaaatgacgggcttccacgataaaggtcatgtccactctacctattttaacgtcgcaatgttacgtgaagctattcctcatcaattttggttaaaccccgttgatgcggcacagcgtggattaaaatctggcgatattgctgagatttataacgaacgtggtcgcttgcatattcgagtcaaagtgacagatcgtgtattacctggtgtgattgcagtaccacaaggtgcatggcgttcacttgatacaacaggtgtagataccggtggatgtattaatacattaacaagctggcacccatcgccgtttgctaaaggaaatccacaacatactaaccttgttgaagtgaaacgtgcataaggagttaactcatgaaacaatatggtttttattttgactccactaaatgcactggctgtaaaacctgtcaagtcagttgcaaggacgaaaaagatttagatttaggccctaaattccgtcgtgtttatgaatatggcggtggtagctgggcaaaacaagacggtatctggacacaaaatatttatagttattatttatcaatttcttgtaaccactgctctaaccctacttgcgtggcaggttgccctactggcgcgatgcataaacgtgaagaagacggtttagtggttgttaatcaagatgtttgtgttggatgccgttattgtgaattacgctgcccttatggcgcaccacagtttgatgaaaagaaaaaattgatgtcaaaatgtgatggttgctatgagcgtgtcgcccaaggtatgaaaccggtctgtgttgaatcttgtccacaacgtgcactggattttgatgatattgaagtgatcagagcgaaacatggtacagagtgtggtatcgcaccaatgccagatccaagcttaactaacccaaatatcgtgataaaagcacataaagatgcaaaaccttctggtgataaaaccggctcagttcaaaatgcggcggaggtataaaccatgcatgaacttcctcttgtcttttttactgttttaggctctagcgcagcaggtctgtttctgatcgcttatatcagtaaaaagttaggtcaaattgatgaacaacaactgcgtaatgccaatattcttgctctgatattaatgcttgtgggcttaggtattggtggattacacgtaggtcagccactacgctttttcaatatgttattaggcgtaggccgttctccaatgagtaacgaagcttttctaagtggtgtatttactggttttgcttttgcaacagtggcactcactattatgaaaaaatggcggggattacgtgaaatttgtaatctatttaccgttatttttggtttagcttttgtttggtcaattccgcaagtttatcatattccaacaattgctaactggaatacagattacaccacattacagttttggatgacgctattaattggcggtggggtacttgcgatggtcagtggtgcaagacgtttaggggcattgtcctttattatcggtgccataattacctttgcagcacgctccggttatgtcagtttcctaagctttaatggcccagaattaagtgctgagcaatcactgttttggggtttccaattagcagtattagcattaggtattgtggttgtcgggtttagtgcattaaaagcgcaaacctcaaaactgaccttagccacttgtgccgcagcggtcgtaattgctgaattatccggtcgcattgccttttataacttatggcatataaccatgtaatattggttttctgtgctatgacgctctatcattattgatttatcatcataagcatagtcatcggcaagaaacgaaaaacaaaatgcatatctttttagatatgcattttttctttttagaatgaggagccgggttgttgtaaaaacgctaactcttctggtgtggaagtacgccctaaaatttcattacgatgaggataacgaccatatttatcgataatctctttatggcgtaattcatattgatacgtgtcgtcatcatttaattgtgaaaacaacgcaatggcatcttgatggattttttgtgattctgagtgcataaatggcatgatcagaaatttgcgttttactggtgtcagggtgagatattcgggtaatcgaatggcttcttgagcaagaattaacgccatattatcttgggcgaaagcctttggtgtatcacgccaaatattacgtgaaaactggtctagaataataatttcccctaaccgcccttcaatgctctcgcgccaagaggcaagctctgcgcgacttgcgctaatacatagctcaccaaatctatccttaatttctttatcaaaagcgctatccttttgaaaccactgttttggggtacattcttcaaaccaaaaggttaatacgggttggtaaggaaccatagcgataaccaccttatataaattgataagaatattatctctaaagtatactgatttttaacctatgaatagtatgaaaaaggttacagggatcgagcttctttaaaaaaacaaaaaaataaatcctctttaaaggcaacaagaggattttaatcacgtcctagttaacacttagctcctttaagtgttacccatccatgagcaagttatactctaaacaatgttgttaatgatatatgtaacttagtaatcaatataataaggatgttgttactataaccccctttgggatcgttaatagaatagataaaagcctaaaagggataaagcttaaaaaatagtgttagggtattaaaaagacttacagtagcaaaggctgcggtaaaacaagaaaagttgttataagcttgttggatgttacttaagtaaaatatgcgatcaataatgaaataaatgctaaaaaaacaccaattgctaatgacatttgttgaaattttttcttcttagtctgtttctttaacaaaattagcgtacaattactgcaatttttttactgaagatcgactatgtctgttattgcaattattggaataggctacctaattggggctgtactctcttttattatcaccttctttttaaccaaagatcccagcttagctatgcgcctgctgagtgcttttcttatcgcaataacatggccattgagtttcccaatggccattatattttctatttttggttgattatttataaataaccatgtaaaaattttttttgaaatgttctattataccataatttattatcctatatctctttagataatattatataatttactattccaaaattaattattatgattagaacataatattaataatgtttaaaatagtaatcttcaacagagatatctaaaaaatctctgttgaaaagaaaatataatttatattcacttacaacaaatatagagcttgtatattttcaaacaaaagtgaatagattaaaccaacacattaaccttatggatagctgaatcattatactgataatcgacttgaaatatcattccattatttttcaatctaacaattgcataactaccagcaccaagtggtacacaaataggaaaatcatccataggtattaaacaaagtgatggctttcctcctcctgaatgatttgcagaaataaatagaaatcgtcctcgacaatccatactaatatggactgactgaccatcagttaatcctttattactactaaatatttccttaagagtaacattccctttagcttgatatcgactatcactttccgccttagtataactactcccaataactgcataattccctttgggttgataattccccttcggctgatatttaccatctgactctgatttagaataactataacctgtcgctaaataattgcctttaggttgatatttattatcagattccgttttcgtataggatgcacccactaatgcataattgcctttgggttgataattcccttttggctgaaaagcatcagtagcggctttttggctaataacatgagccgttgaggttccggtcgcttgagaaatattacccttatcaaattttttattaagctcattttttaaattggtattagtggcataatctcctgaagcttgataattgcctttaggttgatatttcccatcagattctgctttggtatagctatcgcctttattcgcataatttcccgcaggagcataattgcctttgggctgatatttagtatcagattccgcttttgcatagctataaccttccgcttgatatttacccaccggctgaaaacgcttatcagcctcggctttgttataagcgcccacttcattcgcggtgatatcagcttttaactcagcccatgcattaccggcaataggctcaatattattattctcaattttagactgccataccttattgttatgataaaccacactacgaatagcatagggcttgcccgcttctgaccatttagcaaaaccttgtaattgcatttcaccaatagactcggtgatatcgtgaaataggctattcattttttcacgttcaatatcttttgcggccggatcagtgacttggtcacgctcataatcataaccgtaaccttgagtataagatactgagccatctgtttggatctctacaggcacaactgttttatccccttgcgtggcaaaggggattttaaatattttagtcataggatttattctccgaaattactctttaagaaatttttacgatatgaaccataaccaaatgcttttttagttatgatgcgatatttgacgcctacgccagaaggacgtggcattaaatcgaagttttctaataataaacgtaagcgttcatctggattaaaattaaaaacgtaatacatatacgtcatatcaaagggatcaagtacaaatactttactttcacctcgccagaaaaaacgttttaaaaattgattaatattggtgaccgtcggactttgggtgagattaaaataacgcattcttatcaacattcttttttgatctaacgtcagtgataaggtgtaatcggtattgcgtcgaaaatttgcgttaaaattagctttctttttaccaaagccaaaacctatttttgttttctcacttggggaaatatcaatgcctaaaggcacatctaaaatacgcgcccagactgctaaaccaaagtcgttggcggtatcaatattaaatatatcgcgataccaattttgccaaaataacacggtggattggtgaaaatagtctgccttaaaatgagccagtgattttaatttatcggcattttcatattgccaaagtatcgcttgtagaagatctgaatgataatcaaactgttgaatattcataccatcaccacttgtatcgcccctttaggtaagcgggcaatttgattaatggcaatgggaattaatgctacatgccaattttttccatctgttgataactccacttttgtgacaaataaatgtggctccacagcattgacggcagcggaaatctcaaaaggagagacatctcgccctaccaccagcccattatccccctctatctctccatgactccatttttctagtgcatcaggaataatggtttgtgcatcaaaagaggattttttaacggtaactttgcaaaaaatcgtcacttcttttggtcgtgaaaatttaatcggatatgcttgaccacttgctggctctaagagatttatttcaatatcaccattaaacgccgcacctattgttttcgttcttaataaaacattggcaatttcatggctgtctcccccttcaacacagacataaatgctatgtggcaataaggaaataccatcgatagttaatgttttatcagtgaaattttctcgaaaagagagagagttaacccctgctaattcatagagggacgatgtaatagcttgggcaacactgatggtatttttagcaagagtctgtttacgccgacgcctggctttaatatcagattctgcataacggccaataatagcgtgcgtggtattattgactttttcccagcctaataccgaacttgccactttatttaattgcccaataccacaagtgataggcccgtactctttagcgcgcatatccccagttatttttccagtgtctgcgataataagagaggttaatgtttcaaatactgcgccatttatcgttagagcttgtgaacctttagggataatggtgccgggcactcccataaattccacattacttaaataggagtgtgtggcattaatacgctctcctcccattaacgcccatattgcatcaagaaaaatacccccagcaatatcgggattaatttgattagcaagttcggcattattacgcacaatggcatcgcgattttcaatttccattgttgccaaaaccccttggggcgtttctggcgataaattgattgattgcccaaagacagtgcgaaattcgtcttctacctcctttcgtagcgctgccgtatcaggaacaataacacctttattattaatatatcgataatcagccatgtaatgtaaatcctccatatatcgtgcgtatatccgcctgatatttcagtacgccattatctaaaaaggcattaaaatggctgatagccacaacttcctcgatttcagccagacgttgtcgaaaagccatttcaaataaaggaatatcaacttgacggctaaatgttgctgaccaataaggaatacctttatcttttttatgcaacatctcaccacgaaccgctttaataaaatgctgacaaaggttttttactgcttcatcgttatcacaaatttgcagatcacctttagcatcaatcaccagatcattatgctggtttatagcaaatgtcctcatattggactccctgtgttatctttgcctgcttgtacgccactatggcgatgggttgaaccgatatctttcccgttgtgacgcatcacgcccccttgagaatcactatttccatttaccgcataattaccatttactgtgacattgccggtaaatatcgtttctggggcattgatttcatacttgggggtttctagtacaactttatcgttatgaagagaaaagcagacagaaccatccattgactgaataaccaaagcatcaatattttttccgtcgatcacccaaccttttaaggtgtcaggaaaaaacatcgcatcactaaaggtatgtaatcgggtggtattaggtctatcctctagaccaccgcgttgaaaaataaggctaatatcacgatcattagcttttaaccaaccaaaatctcccgctttaatcggggctctaataaaaaaacctccgccaccaaagcgaaatacgggaatatttgcaacgggtgctcgtgaaatagtttgattatccgtggttaacatcatcaccagtggtttgatcacggctcgattgcttttttcatcataatcaatgactgttgcgggcaacatatcatccgtattcatcatcaaatggcgaaatgcggacgagaaagcccctgccagtgaaccaacactcgcaatatcgttattgggtttactcataattaagctcgtttacaaattgcggtatagttgaagtcagcctcatgtgaggcaacactaaacgctaattgctcaatgatgtaatcaccatttaatgaagggtttaatttactctcaaggcgaagcattccaccaagctccgaggtgctatcaatcaagtaacttacggttaacccactttctgtcgctttgggaatgccaatcatgcctgaattcatatttaaaatacgcaaacggctttttagtgctttgtcgtcatcttttacaaataacgtatcatcatcaataaaggctttaacgtccccagcttcctgtaaacgttctatttgatgcaatgctgagccacaataataccaattagcaatattcttatcggtagcttgaaaatctagtttcaccccacagtcatcagcaatagccaaggctatttcactcagcctgcgcattgtgccgccactggaagaaataatttttcccgcgctttgatgactggtttttgccgataaagttaacgtcacatcaggaggtgaatctatttcagcactgacaatatcgccaataaataaagagagtaatccggtattaactcggccgacctccaaatagagtcgtcgcgtttgcttattgttattatagggactggtttctgtcagcagataatctcttgtttgtgcatttagccctgagatagtgacattacattcattttgtaatggattggcatactttgttccactggctgaaatacgtaatccctcataccattgaagccgttctccgacttcaattccgagccttattcgtcgaagatccatcttcctcactccaatacactaatgattgcgtcttggtaaattcctcataccaaggtaatgcatcatgctctgttaaaaacattaaattaattccctgatttaaatagcgataaggaattatcggtgtattagcgacaaggcgcattcctgtaataagtatttcaccttctcgctcgatatcacaaaacatggtttgattagccactttaagcgttaattgccaattcacaccagctattgctacagaaaatcgttgattaggaatggcttgtaatggtatttcttgcattttttctacctcctagccctgtttttttcctattggcatggattttttacttttcacatttcctcgattaatcgttgaggattgcttaggttttttagtcgatttagctgattttttattgtattcaggctcaatgcttttccattcaataaacttcagttttaactcaatagcgtctacttttgacggatcttcatcatggctaagactttctaatagcattggttgataggtactaacacgtgtttgaatacccactaacgtattttcgtcatataactgttttatagtggcataagcattagcaatatcacccgttaacaataagctgatactgatactgatggggttgatcaccacatggtcactgcgactttccccattttctaccgtaaatgtaatcgcttggtggctatcgtctatggtgacttgagttgggttaacactatcaaacaatgtggtaaaagaggctaaatcaaaaattctaacttccgttatcataattacaccctccagccactagagtgattctgcgatatatttttagcttcttgctctgtataagatttcttgatttctttaaccacctccgcaccatttgtggcttgagtttcaattttgatttcaccaatttgcacattactttcatttttaatgcttgattgattactgatcatttgactggtcatcgggtttaaactgttatttgacgatattgctaatccgttatttaacgatttaacctcctgcataggactataataccgtgtcgctgtttgagattgtggcaagatatagtcaagctccccctcatttgttaatcgccgctctaccttttgcaccacacgaatttctttttcttcgtcgtccataccgaaaaagcttttggctgattgccatatatcttgtattaggttgattttttcatcgacaaaatccaatatcttttcaacacagccccacatccattcaaataggctcaccactgaatcagaaacaaaaataaagatatcaataatggattgcccccaagcaataagattattaatccctatttctagagtctgtataaattggttaaatgagttagatattaaatcccatgcagcaataacaaaatcagcaacaacagtgacagcctcttttaaatattcaaagaatgattgccatgcctgccatatcgtcatgatcacactttttaatactgggtatttttctaatatacggccgatcatggaatcgttaccgttaataaaattcataatatcgtcatagacgagtttaaaggcgacacctaataaaccaatcaccgttgcaatagcaataataggtaatgccatggcaagtgtcgatgcggcagcagagatcatgacgggtaaataataaatagcaacagcggcgccgatggcggagaaaaagctaatcacaatatctttatttttcacacaaaaatcgactaatttatcaaaccattccataccttttgccagcgtaggaataatcatatctaaaaagttatttttgaattgtgccgctaattgactaaatttatgtattgtgacattgagttggatcgcactttcaatactgtcgtcgttaatacctgagaattgtttttgtacctccatcctacgctctagctcttgacgacctttcatcattaattcgatggttttatcatcaacaacacctaatttttccagctctttttgggcatcatcaaaactcatatttttaacgttatcagcgacctgtaaaagctgctctatgggatcttgcgtatcatcaaacgcatttgccatagcggctaaatccgcttgagcagcttctttcgtgccaccaattgcagccatcgcacctgaaaaagcgtcaatatcaatcgccgcaacacccatttttttactgagtttatctaatgattcgatttcttgagaacgttcaagtgacgcagaaaataccttttgtaacgtccccataatatccgtagcacctatggcgtttaggataaaatctttcattttatcgacggtttgctgataacttttcccggtttcatcaacactactgcttaatcgacgttgagcttgagcttcttctattgccgctttaataccttgggtttgcatggtgctgataaattgatcgtaatcagcacctagatttttaatgacttcatcaataactaatttattttctttatttttcttttctgcctcagttaataaagttaattcattatttaatgaagcaagctgatcttccattgcctgatattcagcatttaaattcgcaagatgacttgcatcactatccacatcattgctgagcaaatttctcgtgtaatttaatactgacatcgcttcttttagagcgtcaatgcttgacgtaattgaatggatcttctcttgtgtttcaccactatttatttcaatatttatgggctcatcaagcgataaactcgtcagccccattaagatattttgcaaaaaagtatcaaattcttgagtactactaagtgccgttttaacgatttgttgtatcgaattttcaacagtttcagaggcttgaataatttcttggttgtccaccgaaaggtttatttcaggctccagtgataattcgttaaaactggcggctatttcttgaacaaaggcaaaaaagcgattaatacctgctgatgcgccctgctctattttcttcatttcctcaagaatttcgttggtcgatttcctgatattatttaatgcgttatcagatacctccgcgtctaacgtcagtacctgactaaatacgggtaatagcgacattatctctccttggacgccgctagcgcctcgttataacgattggtaatcgcaatttcccacagatcaaaagcttcctctaaatctatggttgttttgagttctgtgaaagaggcgaagccggctgagatgatgacggcaaagaagccatcagcgtttttataatcgacgggagagaaccgctgagcttgcctaataggtattgaaggaaattttggctcccgccgttgccgaaaaaactggtgttgtactttaacatttctaattcaagacgaattaacgcttccccatcagggacgtgattatcaattaatgtactggtttttaaataaatttcttggccttctttttctacagcaacatacgccatcatctttaacatggcctctttactgacttcataatcaccgattttaggggcatttgataatgggtatttagccaagatctctcgtccaattgtggcgggtaaccggctaataataaaggtatgctgttgacgatcactatcaatcaccgtgatctcttttggcttaatcaacatataaaaactccataaaaaaaggcgaccgaagtcgccatgataaaaagtaagattaatatttaacgcgctctaacacggtcaaaatcttggaaaataaaagtgtactgcttagatttaaggcgtcctgcccctgcgactgaattacctcggcaaccgtcagtaatacgtccattacgtgccgtggtaatagagccatcgccataagaagcgactaaagtaatcacatcactggcaggacgtcgcccccgtcttgccgtattagcatcaaacaaaatagctagattttcgtcttcttcacttcccgctaacacattaatggtgaccgtttgaggtgttggtgaagaccaactgaccaaattaccattaatatctaccgctgtttgtgtaatattaactgtcggtaaatctaaaggatcaccttcatcagaaaaggtggtgatcgggatacccgctggaaatgttttacttgcttgaataataaggcttaagcctgttgctgaaatatcgttcattgtttgttccttaaactaaattatgtgagccttcaactttacgaacccaatcgcctttaccgtaaatcaatacatatttcatggtgtattccggtaaattccctggccctgtttgttcaacgatttcagcgttgtaccaataacctttgttttgtacatcgtgccacgctaaatcatcacctgccgcatctgtaattgcgattttttgtacttctgttaatgctttacccgtttgaatagtgccgttatttaacgcctttgttactgccccagcaatgatcatcatcgctcttgcttcaccatctttattcgcaggaataccgcgcgttgacagtagtaaactaagccactgctgtgcaatatacgcttttagccattgctcattggcatgtacgctcatatctactggattagcaccattaccacataaaaagccacgttgatagaaactgatctcagagccagataccgccgtttcaccataatagttcacgcgcaatttatctaagcgatcggccgccatatctgtggtaacttgcgatgggaatgtaataccaaattgtcgatacatgtaattggtggtggcattagtacgctcaaaatctgttgctgccataattgccataggcaacgcttgcacaaaaaagttttcctcggtttttaaattcaaccctgtcgatgcggtattcattaatgccttgctgtacatttcagcttgttgatctggcaccgataaataaagttggtatttgacattttcacctgctacgtattcagccagttccacactttgctcaatagatagttcggttaaaaatgttgcactaccaaatgagtcagaaatagcttctgcagccataaatgcttcaagggcagtctgtgatgcattaccctcagaagtttgtccctgacttaaccctaaggcatcagcaagaggtgagttgttgacgctaatctgcgctttttcttgcacaccgccgctgattaagaaagcactatccatagcattaaaagtcacataacaactggcaaattgtggctcactttcagcattgagttttgcttgaattaaagatgcaatatcactataggacgtcacgtcttgaagagagagcttgctgatttttttggtcacatcgccaatcaccagcgttaactcaccctcttcaatcagctttaatttatccagtgtggcaaccggcccaccaaagagtgttggcgctcgtcccattggttcataagaggcaatttgtagctctttaggcttgctgacgggagccggactcacataactaaaatattggcgggcaaattgcgcttctggagaatcagctcccagaaacgcatcaacttgaccagaagtaaattcgagtactttccctgctggaattttagggtttgttgaaaaaatacgtgcggtcagtttacgcattggtgcagtagagacaccaatcaccgcactcgcaatatcaacatagcgtgtttgtttaatagacatatttatccttaaatacgagatagattagatataagtaaatgtgtagctgcagtgtttagagataatgagcagggaaaagtgacattaaaatcaaatgaaggattatgttcatagctatttccttcattaattattggcgcacgcctaatttctgtcgcacgttgtattcctattcctttttttctcattgattcaataaaaggcagcgaatgaatgatcattcgcgttgttctaattaaatcacctgcagtaaaatcagattgttttttagtaaagctctgaacttgataagttaactcaacaagttgttgttcagtgtgattggcattattaccttgaacatcataacttcttttctgccaaccttggctcacctccttaataggaaaaaacataataatattattatcagtgatttcttccggttgatatcctgtaataacttcagcattgatatctgtttttattaattgttttattaattgctctcgaatagctttattaatatcattatcattcatttcatctcctttattttacactcctttttaatcactttaattaatacactcttggcgaatataatcttgtagacctaagatgatggactctgactgagcaattctttctctgagtatccaataatttcggatagcggcgtcagtaggtctggcgcgggttgcatcatccacgcggggggtggaattggcgtcgtttgttgcacaactggctctgatgtacacccgctcaggatcacgctcagcataactacgcaaccggtcaatttcgctcttggcactggctaactcctgtaaacgttgagtatccatttgatataattgctttattcttaattgatagtttttgttttctacaatctgttgcgtcagtgtttcattaattttcacatatttttgttttaatattttatttctatcaataacccaaaaaagtccagcaattaaacataacataatgattattatgatttttgtaagattgttcataataacaaccaagcatcttcaaatactttttttgcatagggttgataacccagttcaatattaataatggctatagataaagatatacaaacattttttatttgggtatcaataggtttattactttcaatccctatttcttttgatacgcgctcaatataacctaatgtattattctcattaggtggtgcatagcgataaataatagttttaattgtatttaaaccatattttttttgataggtttgaattaatttataaattgctctgatgccatattctggtgaaataaattgacaaaaatctttatctgtttgcgtgcttgctaatccttgccattttgcaccatggcgtatattacctgggttattattacgttcaccccgcgctattttagccatttttaactcctatttttccttataagaagtttgcttacaggttcaatgcctacatagccaataaagacactggctaagtaagcaaattgatgattaatactaaataaaaggagaatatctttgataaaccaagcaaacattgcacacatcagtccatctaaaaaagtttttttccatcctcctgcgttatataaacttcgaagaatagccattcccccagcgagtaaggctgatataccttgctctttcattgaataaagaacaatgcatatttgttcccatagatctggattttctttcattatttcttatggcttacctccaatcagaggaaatgtcattaataatatattcattcttcatatctaattttaatcacaacgctaatatgaatatattgacgattttatttatctaataaatgtagataaaagcgtagtataaaaaatgccataacataaacctattggcagtgagatcgattaactcgccaagcttatataatggtcagtgtgatagtgataaatattgaaaacaaaaaagccccacttcaaaagtgaggcttcttagattttgctgagagcttgttagatacaaatctctcactgtggagttatagtatgcttatttttcctttaagtcaacaatattttttcataaaaataaataaaaatagaaaattattattttatagtaacttcttgtagaaatttatctgataaagactcttctttaaagcattccgccactaaaaaatcaaatagcggtttataatgactataagcagccgtttttgaaatactcaccacatgttgcaattgttgtaagacttcgctgaatttaaggcgaggataaccgcgtccagcacattggcgacaaggtttaaatacggcaactccttgtaattcagtctgttttttatcaataatttttccacgtccatggcaacggcatgctaaacgaatttccgctttacctttgcatgtagggcaaataacgcgtgttacttcccttacctctcgaaaagaaggtttatttgatgaggttgtttttagatgaggtttggcattttgagtaacctgccgggttgtttttcgaccatggcatttggtggtaaaaacttcaacttcgataaagccatcatcacaatcaggacatgctctcttgctggctgcacttctggcataatcctgaaaagcatattcagcgataatatgtaaaactttagctttatcatgttcagctaacttatcaatcatcttatattggttaacttgagttaatgcacattgatacaggctttctatcgcttcttcgggacggttaatgtggtgtttcgctaaaaatagctctattcccattcgccctttacgtgtcgctaagcttattgaagccattacatccgtaatggataatgaatcaacagctttaggcgttctaacatcacttaatacaacactttttggagaaaaatacttaggtaagtcagctaatctcatacaatattccctttgatttactgtcacgacttatttgcttatccatatcccacaacaagttaggggcacttacatgcctgcttaaatcaccattagcgtattgatgcactcaatgctattttatactcaacctatccgttatggttaatttagttaacaaatcatgtttaacatacttttattaactgttagttaatgctagtatgtaactaaagtcacgtcaagatagaaaaggaaattaactagtggttaaaaatgactataagttagcattcacaaaaagactacaagaagcctgcctagactccgggattgcgggtagagggttaggtaaaagaattacagaggcattggctaaacaaggaataaaagtcagtgcgcccgcggtctggaaatggttaaatggtgaatccgttcctgactcaacaaatattttagccttaagtcagtggctcgatgttcgagctgaatggttagaatatggcagaggcgccaagaaaaatgatggcatttcagttaatgaaataatgcctgttaatgattgggataatagtactcctatagagcgagatgaagtggagatcccattttattcaacaattgaattggccgcaggttttggcagttgtaccactgataatcaaaaggtggaattattgagattctctcgttctacatttaatcaatatggtgtacagccaagtgatgctgttgcttttaaagtgcatggcgatagtatgtcaccagttattcctgacagctctattgtaaccatcagtacagggcatactaagattattgatggtggtatttacgctattcagcaaggtgacttgttaagagttaaaatcttgcaccgcctacccaataataaaatcattattcgtagctataatacgattgattatcctgatgaagaatcaaccttagaagaagtaaaaatcttagggcgtgtttttaattggtcggtgatgggctggtgatcgctttaggaaaagtgaatgaaaaagtgaatagtgctaacactaggcttactgatattcaccgttaagcctaatgttagcttttttaaatacaatagctcacaagatcaataatcctagaccacgttttacttcatcaagcttttgttgagtcacttctttcgctttatcgctcccttctttgatcacttgtaataaataagctttatcattaataagttgcgctcttttttcacgtattggttgcagaagctcttgtaagatatcattaagcatagctttgcatttcatatcaccaagtcctcctctttggtaatgagccttcattgccgtcaccatggctttatcttggcaaaaagcatctaaataggtgaacaccacattaccttcaatatgacctggtgatgcaacatcaatatgttgcggatcggtatacatcgaataaaccgcttttttaatttcatcggctgtggatgataaattaatcgtattacctaaggatttagacattttcccactaccatctgtaccgggtaaacgaccgacttgccctactacgaccttacaacttgtcaatacgggttgtcctattaagctatttattttggtgacgatttcattggtttgctcaatcataggtaattgatcttctcctgcgggcacaatatctgcactaaatgcagtaatatccgccgcttgactgacaggataggttaaaaatcccgccggcaatgaacgagaaagatttttttgcaaaatctcatgttttactgttggattacgctctaagcgagatactgtgacaatatttaaatacagcatagtcagttctgataaagccggtagtgcggattgtaagcataatgtggaaagtttcggatcaataccaacagctaaataatcagccaccacatcaaaaagaaatttactgaccttttcaggtgttgagccattatcggttaacccttgcatatcagccattaagatatattgtgtcgctttcttctgaaattcgacacgttgctgaagagagccaatataatgaccaagatgtaaaggtccagtgatccgatcccctgttaaaactatcgatttattttcagtgagatatttgttcattgcatttccttcgttgggataaataccgccagagaaatgccataaacaacatcaccgcgctctggcggcaatagtgttatttatataaatcaaagataaataggactaggtgccgcttaaataaagcgccaccaattttgaattgatcttaatgagcgaggtcttgtattcacaatctttccttattaacttatttagttgtatagcagttttatctataagtcaatcaaggaaaattatcctaagatcatcattatcccaacaagtggagataagaaaaaacccgttacctcttacgagataacgggctcttatatggtgccggctaccggagtcgaactggtgacctactgattacaagtcagttgctctaccaactgagctaagccggcgaattctggcggaaggatagagattcgaactctaggatggtttcccatcggcggttttcaagaccgctgccttcagccactcggccatccttccatggcgcgcaattatgcctatctctgagcttgctgtctagtcctgatgataaaaaaaatgttttttttatttgtttgcttaaacttcagtcgaattttgcctaaaaaacgataacttattaatttagtggttaaattttgtgagtttttgctttgtgataatggtgctttacagataaaaacgatgaataaaggcgagaaaaagataagaaaaaacccgctatctcttacgagataacgggctcttatatggtgccggctaccggagtcgaactggtgacctactgattacaagtcagttgctctaccaactgagctaagccggcgaattctggcggaaggatagagattcgaactctaggatggtttcccatcggcggttttcaagaccgctgccttcagccactcggccatccttccatagcgcgaaattatgcctatctctgagcttgctgtctagcattcagcgtaaaaaaaatgactttttttgtttatttgctcaaacttcacccgaatatcccttttaaagtaataacctgttaatataatgacttaatactgatggttgtttagccaattttttcttttttattgacttcatttcttaaaggctcgcaaactgaatgcgtacactgacccaattaaagccaaatacattaactcgcttatatgctctgtttcttctgtttatggccatatccctttttctatatgcttatagctattttgatacttggctagaaagtaaaaaaaatgccattaataacacgactaataagtttgcttctcaagttgaagattaccgctatcacgctaaccaactattccagttatcaaacaaaattaatgatccaaccctctttctgcctttaaaaatcaatccggtcaaactacgctctgatgtttattggcttgaaggacgcgatcagaccgttgacgctattgtttttggtaaatcgaatgaacaaacctttcagttagccggttattttgcaaacgcgttagaaattatttggggggtacgtaataactatagctctctctattatcttaatggtaaaggcaatgatcttatccttattactacccactcaatactaaaaccagaattgcgctataaagaaagctatttaacactaacggctgaaaacaaacgttctgagctattaatgcaatcaacggcattagatgaaaaagagagcctttctcccattaggaaaatgccgacagaaaatatttattactatacctaccgcaccatgtttaatgtgccagggcaactgaccagtgttattgcctttgatttacccataaataattttctacctgctgagctatcacctcaatatttaagattattacccacaggacagcagagtgtttatgataaaaacaatattgaggtatcaacggatgggacttcactcatcttctcacagcccatcgcaggaataccctactctttatcttatgagtatccactaaaatcgattttcaatgagattgtgtataaaaatatctggttacttatcagcctactcatttttatctcgatttcagtgtttggccatatctatattcgtaataaatatgtattcccttatatttcgatgacgcgtaatcttcgcatcaaagaagagatgactaacgatatcatttctaatcttcctattggtctattggtgtataatttttcatctaaccataagattattagtaatagccacgcagagaaactattacctcatatcgatttatctaagatccgccagatggcgattgaacataatggtttaatccaaacggccattgataacgaaatttatgagatccgcaccagtagcaacagcaatatcgataatactgctctattcatttttctgaataaagacaacgaagcattaatcaataagaaattgcagctagcacaacaagaatatgaaaaaaacacgattgcacgccgcaagatcttatccaatatgtcattggaactcatacgaccaattaaagatattaatgagatggtatatcaatttaaagatctacttcctaacgatactcaccaacaattactgagtctgctattagaaaaaacgaattatatttctgagtggatagaaaacattacgctaattaataagttagaaaatcaagaatggaaaatacatcaagatgaatttgaactttcaacgctagttgaatctattctaataaccgcatcaccatttatgataagaaagggattaacactttatttccataataatattaaacctagtttacttttatttaatgatggcccagcattaagtaagattattttatcattgattaattatgccattagtacgactaattatggaaaaataaccgtcaatctaaatttagaaaaaaataatgataaagaagaaatagtaattgatattattgatagtggcagtgggttaacagctcaagatctggctaatattaaatatccatttttaggtcaagctatgggtgataaatattattccaactcgggtattattttttatttatgtcatttgttgtgtaacaaaatacaaggcactttgaccattacaagccaagaaagtattggctctcatttccgtatcgtacttccataccagcatatagatacagaagagcgctcttttgacatattattagagggtataactgcaaaactcgccataaaaaaccctgaaatagaaaaaataatctgccaacagcttgataaatatggcgctacatactttgataaaaataaagagaatctttactcagaatacgatatcatacttagagacactccggataataatcctgaatcagcaacagtattattagttagctctattaccggatttgaaaaaatagcaagaaatttaataaagtgtaactataacttcggtgatccattaattgaggctattacttatttgattgaagaaaatgaacaactttctctcgaaacaactcaaacgagtattcgtaatgagaataataaccttgatcatcacgaagtaattcttaataattataggaagaagttgaatgatagtgattataaggaactatttatcaatactgttcccattgatgttgaaaaactacacttagaagcaactaataaagactttcattctctagctcagacagctcatcgtctgaaaggggtttttgctatgttagatttagaatatctcagagagaactgcgaatatttagaagatgacataaaaaatcataatgaattagagataaaagaacgtatcaatcaactggataaatggatccgacagttgctgtagcaaggtaacaattaaacatgaataaccttaatattattattgccgatgatcatccaattgttttattcggcattcgtaaatctttagaacaaattgaatgggttaatgttgttggtgaatttgaagattccacttcacttatcaataacttatctaaattaaatgcagatgctcttatcaccgacctatctatgcctggtgataaatatggtgatggtattacgttgataaagtacatcaaaagacattatcctaatttgtctattattgtactcactatgaacaataacccagctatcttaagtgctgttcttgaccttgaaatcgaaggtattgtattaaaacaaggtgcgcctgctgatctacctaaagcacttgcagcattgcaaaaaggcaagaaatttatgcctgaaagcgtggctaagctgttagaaaaagtgaatgccaatggttatggtgataaacgcttatctcccaaagaaagtgaagtgttgcgcttatttgccgaaggtttccttgtcactgagattgctaaaaaactcaatcgtagtatcaagactatcagtagtcagaaaaaatcagccatgatgaagctcggtgtcgacaatgatatcgctctgcttaactacctatcatcagtcactattgataaggaaattaacggagaaagctaacccgttaacttttcttctctatgctgtatagataaaatcaggaagctcatacccattgtgggagcttctctgcttttttattactttttatccgccatcacatcgttggcaacaaaaaaatgttttcccctcttcccctatcatcctgagccggcaacctagcaacaatatttatcactgtaatatcgaaatttttcaatcagatctaccatgaaaaaacctcgtttttccgagattaatcgttggattatgccacataggtgagtaatacgtcttttaatacagtaagagagactggcttggaaacacaatcattcattcccgcatcaatacaacgttgtttttcttcggcaattgcatttgctgtaacgccaataataggaatagtgcgactcaattcacgcactgttgtcgctaattgatagccattcatatttggcatattgacatcggttaaaataatatcgacatgattttcttgcataaaggctaaagcatcacagccatcttctgccgttgcggtattaaaaccaatttttttcagttgatcggtcaacaataaacgattgatagggtgatcatcaacaatgagcactgtcaataattgtagatcgtgatccgtcattaacgcattattttctgagtcatcagactctaattttgtttgtggtaattgtaggataatcttaattaattcatttaatttatatgtactacataaccaattattctcagagattttctttgcaggctcaaaatagtgttcataaatacggataaattggcaagagttatctaaacattcatcatgatcggtgataataaaatcattctcagatacctgagtcacttccgtgaataattgacaatgtaagcccacataacttagatatcgttcaacaaagctttctagatagagatttttaatactgataaagcagcgaatagtactctctttatagagattatatttggtttgtccatcactcgaatttagtgccccatataaagggatccgcacagtaaaacggctacccacattttcttgagaaacaacactgatatcaccatccatcaagttaatcagtttttcacaaattgctaatcctaatcctgtaccttctgaagcactttctgtattttgcgagacctgaaagaagggttcaaaaagctgatgaagcattttttcatttatccctctgccggtatcatgaatatcgaaatagagataatattcatctcgatacaggtgcaaagtaatacatcctgtcgtagtaaatttaatactattatttagtagattagagataacttgttggacacgaaccggatcgttattaacgattttaggtacatccggctcaataaagcagtaaatagctaaatcttttttagcaattaacggcaaatagttagagataacaaaagagacaacttggcgacaattgaatggtttaacgtcaatttttaattgtttcgattctatcttcgagaaatcaaggatatcgctgataattttgagtagcagcgatgaagagttatccattgtttttaataatctggcagtctcttcattttgcgtcaatgattgtaataattctaagttaccaataatgccatacagtggtgtacgcagctcatggctgactgtcgctaagaacattgatttagcttggtttgcttgttctgcggccgttgccatattttgtagagagcgttccattttaacacgagcgctgatatctactaatacgcaaatcgccacatcttcattctgataacgtgaattcacaaaactaatttgcaaatgattatgattattagtgaccacatccactatattgctacttttttcagcaataatagagagaatattttgtttatcactatgacttaataagcgaaaataattatgggcgagctcattacttaaaataatcatgccatcacgtattcttaagatacttattcctactggggctgacgcgacaattttatgattaaactgctcatgctcctctaagcgtgaagcattattttctgcaggtgaaaatatttttcgctcaaaaatccaaacgaaaataaagataacaatcgccgaaatgatatttaaaataatggcattaaaaatagtaaacttaaattcatttaaaatttgttttaatggtagtgaataaaccacactaaaagaagaaggaagtagcttacgttttgcaactaaatcactaaaatcatcatcaaagccaaagtaaggagcactaacatccggtacatcccttacactgcgataattattctcttcaggataacttaagactggattatttttattgtttaaaagatgaatagagataacgcgatctttcgtaggtgaaaaatactccaatcggatcgccctttcgataccaatgagtgcaataaatttccctgacgcataaactggcgacatgacatagaggataccgctatcccccttggcatcaggtactatccagtattgattactctctttcccttgagctcgttgattaatgtaattacgtgtattttcataaaccatttttttcaacagttcagtatcaataggtgatgcacgcaatgggaaattaatcatacacatactatgagagccaaccataaatacttggttgataccttgtaaagcaggggtattatctttccagtaatacagaatactattaaatgatcgaaaataattgtttgtttgccctttgaataattcacaatcggcactttcacttaatttatgaagtgaaaaaggcccttcataaaaaaaagaattattcatcttagggtttaaattgagttgctcttgatgccgctctgctaaatattgcaaatcgcggatagtactcgaggtttggcgaaagaagcccaataaatcggtatagttattactatattcttgtcggatatctgatttagtatcattaaagatgttgatgagataaaacatggttaataatgcgcccattgcccacaacatgatacccagtgcacgaaaaaggtagcgggaaatttttaatgacgttttaaatgacgaaagatatcgcaaataaccaccctaatcggtaatacagataatcaactttctcattctaacagaagttactctaggtctgaatgagatgatctttatcatcaggataattttttctgatgactgataaaattttttgactaataaatgcttataatataaaaaagcaggcattccgcctgctttttttgctttaagttactgaaaaatagctattattcttcttcactatccgcatcatctgttggttcagactctggaacatcagagatattgtcgctgatcatttcatcaacttcatcatcatctaatgcatcatcttcatcttcaacacgttgtaagccaacgactagctcgtcttctgtagtacggatcaaggtaacaccttgtgtattacgtcccacaatgctgacttctgatactcgggtacgcactaacgttccggcattggtgatcatcataatctggtcagtttcttcaacttgaatagcgcctaccactttaccattacgctcactcactttaatcgagataacgccttgtgttgcacggtttttggttgggtattcactttgaacggtacgtttaccataaccgttttcagtcactgttaagatatcaccttcgccacgaggaatgatcagtgaaaccactttatcatcatcaaccagtttcataccacgaacacctgtcgcagtacgacccattgggcgaacacactcttctgcgaaacgaaccactttaccatctgctgagaacagcatagcttcattactaccgtcggttaaatcaacaccgataagctcatcgccatcatttaaattaaccgcgataataccagcactacgaggacgactgaagtcttgtaatggtgtctttttaaccgtaccgctcgccgttgccataaagacaaatttaccttcttcatactctcttactggaagaatagcggtgatccgctcatcttgctctagaggtaataaattgataattggacgaccacgagcaccgcggctcgcttctggtaactgataaactttcatccagtacaggcgaccacgacttgagaaacacaaaatagtatcgtgtgtattagccaccagtaggcgatcgataaagtcttcttctttgatccttgcggctgacttaccttttcctccacgacgttgcgcttcataatcagtcaatggctgatatttaacgtaaccttggtgagatagtgtcacaaccacattttcttcattaatcagatcttcgatattaatatcagcggtattttcagtgatttcagtacgacgaggatcgttatattgtgttttaattgctgttagctcttcacgaataacgtccattaaacgctcagggcttctcaaaatatgcaataactcagcaatttgtagcagtaattcacgatattcatctagcagtttttcatgctcaagtccggtcagtttctgcaaacgcagatctaaaatggcttgtgcttgttgttctgttagatagtatttaccgtcatgcacaccaaattgtggctctaaccactcagggcgagcaacattgctatcaccagcacgctctaacatcgcagacacgctaccgagatcccaaggttgggcaattaatgctgctttcgcttctgctggggttggtgcttgacgaattaattcaatcacaggatcgatattggccaaagcgaccgcaagtgcttctaagatatgagcacgatcacgcgctttacgtaattcaaaaatggtacgacgagtcaccacttcacgacgatggcgaataaaggctgcgataatttcttttaggttcaataattttggttggccttgatgaagcgcaaccatattaataccaaaagagacttgcatttgagtttgtgaaaagaggtgatttaatactacttcaccgactgcatcacgtttgatctcaacaacaatacgcataccgtctttatcagactcgtcacgtaatccgctgataccttcaatacgtttatcttttacaagctccgcaattttttcaattaaacgggctttattcacctgataaggaatttctgtcacgataatggtttcgcgacccgttttctcatcagtttcaatatcagcctgagcacggatataaatctttccacgccctgtacgataagcatctaatattcctctgcgaccattaataatcgcagcagtcggaaaatcaggcccggtaatatattccattaattcttctatggtgatgtcttcattatcaacataggcaagacaaccgtcgataacttcaccgaggttatgcggagggatattcgttgccatcccaacggcaatacctgaagagccattaactaacaagtttggaatacgggttggcataacagccggtatattttctgttccatcatagttaggaacaaagtcgaccgtctctttttccaaatccgccagcagttcatgggcgatcttcgccatacgaacttcggtataacgcatagccgccgcggagtcaccatcaactgacccgaagttaccctgaccgtcaaccaacatgtagcgcatagaaaaaggctgtgctaaacgaacaatcgtttcatagacagcactgtcaccgtgcgggtgatatttaccgattacatccccaacaacacgggctgattttttataaggtttattccaatcgtttcccagtacattcatcgcaaatagcactcggcggtgtactggcttcagtccgtctcgaacatcgggtaatgcgcgtcctacaataacggacatcgcataatccaaatatgagcttttcagctcttcttcgatattaactggtgtgatttctctggcaatgtcgctcatggagccactgtccctcatactacggattcaaaggtgtagaactataccacaaatcgccaattttaggaaaactgaaacaatgaaattaatcactctttcgcgattctcttcgatttagcttcgatttcgctctctaacattggtagaatcatcggtaatatgaaaataggagtaatactttctgatgaatgataaaacaacctctttgcatgctaacgtagatcagcatgaaatcgacaaatttgagagtgtcgcatcaagatggtgggatcttgaaggtgaatttaaacccctacatcgcatcaatccactaagacttaattatatccaagaacgtgctgatggcttatttggtaaaaaagtactcgatgttgggtgtggtggcggtattttatctgaaagtatggcccgtgttggtgcagaagtcaccggactcgatatggggaaagagccattagaagtcgcacgtctccactcactggaaaccggtatccctgtcacctatatacaagataccgttgaaaaccatgccgcagaatatccacaacgctatgatgtggtcacttgtatggaaatgttagaacacgttccagacccttcctccattgtaagatcatgtgccaaactggtgaaaccaggtggacatgtattcttttctaccatcaaccgtaataaaaaagcgtggtttatgctggtggtaggcgcggagtatattctgaatatggttcctaaaggcacccatgatgcgaataaatttattcgtccttcagaattattaagctgggtcgatgaaaccaatttacgtagcaaaaatatgattgggttacattacaatcctattacagacaaattccgattagcgccaaatgttgatgttaattacatggtgcacactcaagcgaccgataattcggatttgtgaaatagagagattgatttggtttaataaaacatcaaacgatcacatttttaaaaattgactttgcctctttttagcgtcgttttaagtttctgactgcctgtatttatgcagggtacaggcagttgttaaaaaaattatcccctatttatccacagaaacattcagatttgtacacttgatcaatccctcaattaccattatcttgttatcaccatttgaacaaacccctatatattgtgtttccttaaatttcacaccacaagactccttggcaatgtttgtcatcgggagcgcttttttgcggtataaaatttcaggttgcccatttataggtcattaaagccagaaaggtgcatcgctcatgaatcacagcctgctcgtcacaaaacgtgatggtcataaagaacgcattgacttagacaaaattcaccgtgttattacttgggccgctgaaggtctagaaaatgtctctgtttctcaagttgagttacgttctcagattcagttttatgatggtatcaaaactgccgatatccatgaaacactggttaaagctgctgcagacttaatatctggtgaaacacctgattatcagtatcttgctgctcgtcttgctgtctttaatttacgtaaaaaagcctatggtcaatttgagccaccggcattgtatgatcacgttaaacatttagttgaactcggtaaatatgaccgtcatcttctcgaagattacaccaaagaagagttcgaacagatggataagtttattgttcatcaacgtgatatgaatttctcttatgcagcagtgaaacagctagaaggtaaatattttgttcaaaaccgtattaccggtgatatttacgaaagtgcacaatttctctatgtgttagttgccgcttgcctattttcgcgttatccaaaagagacgcgtatggattatattgagcgcttttataacgcggtatccacatttaaaatctcactcccaacacctattatggcgggtgtaagaactccgacacgtcaatttagctcctgtgttctaattgagtgtgatgatagccttgattctatcaatgcgacctcaagtgctattgttaaatatgtatctcaacgtgcaggtattggaattaatgccggtcgtattcgtgcattaggtagtgctattcgtaatggtgaagcattccacaccggttgtatcccattctataagcacttccaaactgcggtaaaatcttgttcacaaggtggggtacgtggtggtgcagcaacgctattttatcctttatggcatttagaagttgaaagcctactggtattaaaaaataaccgtggtgttgaagataaccgtgtacgccatctcgattatggtgtgcagttaaacaaattaatgtatgaacgtttaatcaaaggtcaggatattacattatttagcccgtctgatgtgccgggcctctatgatgcattctttgctgatcaagacgaatttgaacgtttatatgtacaatatgagaaagataagagtattcgccaaaaacaagttaaagcggttgaattattctcactcatgatgcaagagcgtgcctctacaggtcgtatctatattcaaaatgttgaccactgtaatacacacagtccgtttgatccggcgattgcacctatccgtcaatcaaacttatgtttagaaatagcactaccaaccaaaccattaaatgatattaaagatccaaatggtgaaattgccctgtgtacactttcggcctttaatcttggggcgattgaaaatctagacgatttagaagagctagcacgtttagccgttcgcgcgttagatgctttgttagattaccaagattatccaattttagcagctaaacaaggtgctatgggtcgtcgtacactgggtattggtgtgatcaactttgcttattatctggctaaacacggtgttcgctactcagatggtagtgcaaacaacttaacacaccgtgcctttgaagctattcaatactatttattaaaagcatcaaatgaattagcaaaagagcaaggggcatgcccatggtttaatgaaaccacctatgcagaaggtatcttacctattgatacttataaaaaatcattagatgtactgactaatgaacctctgcattatgactgggaaagcttacgcaaagagatcaaacaatacggtttacgtaactcaacgctctctgcattgatgccatcagaaacatcatcacaaatatcaaatgcaaccaatggtatcgaaccacctcgtggttatatcagtattaaagcttctaaagatggcatcttacgtcaagtggttccagaatatgagcgcctaaaaggggcttatgaattactgtggcaaatgccaagtatcgaaggttatttgcagttagtcggtattatgcaaaagtttgtcgaccaagcgatttctgccaacactaactacgatcctactcgtttccctagtggtaaggttcctatgaaccagctgctaaaagatttgctgctcgcctataaatatggtgtgaaaacactctattatcacaatacccgtgatggtgcagaagatgtacaaggtgatctggaagaagtcgttgaaacggcagattcagattgtgaaggcggcgcgtgtaaaatttaattgaggaagctatgtcttataccactttttcacaagttagaaatgatcagcttcaggagcccatgttttttgggcaacctgttaacgtagcgcgttatgatcagcaaaagtaccctatttttgaaaaactaattgaaaagcaactctctttcttctggcgtccagaagaagttgatgtttctcgtgatcgtattgactacaatgcgcttcccgatcacgaaaaacacatttttattagtaatttaaaatatcaaactctgcttgattcgatccaaggtagaagccctaacgtggcatttttacctttaatttcgattccagaattagaaacttgggtagaaacatggtcgttctctgaaaccatccattcacgctcttatacccatattattcgtaatatcgtcaacgatccgtcggtcgtttttgatgatattgttgaaaatgaagagattttaaaacgtgctcgtgatatctcatcttattatgatgagttaatcaatttaactaacctttaccatatgtttggtgaaggtacgcatcaaataaaaggtaaaactgttgaagttactttacgtaagctcaaaaaacagctttacctatgcttaatgagtgttaatgctttagaagcgattcgtttctatgtcagctttgcctgttcatttgcctttgcagagcgcgaattgatggaaggtaacgctaaaatcattaaattgattgcccgtgatgaagcattacacttaactggcacacagcatatgctcaatttactgcgttcaggtcaagatgatcctgaaatggccgaaattgccgcagaatgcgaacaagaatgttatgacctatttgttgaagcagcagagcaagaaaaagagtgggcagaatacctattctcagaaggctctatgatcggtttaaataaagagatcctttgccaatatgttgaatatattactaatattcgtatgcaggcagtaggacttaaattgccgtttaaagcacgttcaaaccctattccatggattaatgcttggttagtatctgataatgtgcaagttgcaccacaagaagttgaagtaagctcatatctagtaggtcaaatcgactcacaagtagatactgatgatttaagtaacttcgaactgtaaaacagagaactagcgctatacattatggcatctcataaagtgaccctgcaccagcagggtctatcaaccgcattagaatttagctctgaaacgcatccttccttgttggagacgttagagcgcagcaaaattcaaatcgaatatcaatgccgagaaggttattgtggctcttgccgattacgcttagtaaaaggcaaagtatgttatcgcaatgagccattggcatttattcaagctgatgaaattttaccttgtagctgtcaccctgtgagtgatatcgaaatcgagatctgcacaaagtaaaactattgactataatgatcactgttttcttatattgttctttttctaacacaaatgcgtatttttaactaaagttaaataacagagttataaaaaggatcgttactatgaaactaaaaactattttaccgatttgtgccgcctctttctctttactgctattagcaggttgttcatcgccacaaaaaattgaaaccgtcgatgggcaaactattttgaccacagataaacctcaagaagatgagtctaccggattaattatttataaagatgctgaaaccggtgcaatcaaacaaattaatcgtgatcaaataagaagaatggttgagcttgatgattaattaatctttttttgtcattcaacaaccaaagacatgttaaatagcgccaacattttgttggcgtttttttatatcccctttattttgtaaacaaaacattacaccaatcgtaattaaaatttgacagaaatttaccattcttataccctacttttaactaggtaaaatagtttggaaaaacgaggactttgtgaaaaatcgcactataggcagtgtatttattgttgcaggaacaacaattggtgcaggaatgttggcaatgccacttgctgctgtgggtattggctttagtaccatggtgttattgctggtgggcttatggctattaatgagttacaccgcgcttttattagtggaagtctatcaatacaacgatccccatacaggccttggctctattgcgaaacgttatctgggtattggaggacaagtcgttacaggtttagctttgctacttcttatgtatgctttaacaacggcttatatcagtggtgcgggtgaattattagcttcgactttatcttcttggattggtcataagataaccatcacacaaggtatcattatctttacagttattggtggtgcggtagtcggtattggtaccacttctgtggatatgattaaccgcttactctttacagcaaaagttattttcttaatttttatgctggtagtcatgttaccccatgtggaaaaagtcaacttaacctctatgcctatcgctaaggggctcgttctttctgcgatcccggttatttttacctcttttggtttccacggtagtgtacccagtattgtcagttacatggatggcaatatcaaaaaactacgcctaatatttatcgtaggtagcgcaatccctcttattgcttatattttatggcaattagcaacattaggagctattcccaccaccacctttatggggattttagcccaagaatctggcttaaatggtctactcaccgccatccgtgatgtggttgctacaccgcgagtcaatattgctgtcaaccttttcgcagcccttgcactcgccacctctttcttaggcgtagcattaggattatttgattatctagctgatttgtttaaacgcagtaatcgcgcatctggtcgttttcaatctggtttattaacctttgttccaccgctattctgtgcgttatttttccctaactttgtgcaagccttagcctatgccgcaattgctttatctattctcgcactattattaccggcactactggtgtggaaagtaagacaacaaaagcagactacagagcattataaagttaaaggcggtaagccagccttagctattgtatttatctgcgggttagtggtgattggtattcaaatagcgattacctttaatatattgccacaagtgggttaatcaccattagctgataaaaatcaaataaaaagcaggtgttaattgtaacacctgctaaaaataaataactaaacgggaaaaacctaatgttcccgttattgatattagaaacttaaaccagctcctacatagaaaccatcagcaagtttattgttactgtgattatgcgcgttttcaatttcaatcacccgataacccgcattaacatgaagtggtttaaataccgtgtatttagcaccaacatcagcttcataataggatttacttcctgatgttaatccttccggcgaagcataagcttcaccataaacactcagtgaaggtaaaacacgccaattaagtccaacaccaccagctaatgccgcgccgtcatcaccatttttgggggagaggtaaagtgctttaccaccaacacttgctgagaatgggccaagaggtaacgcaaattttgcacctaaactacctaattgaccatcgtgatcactacgtgcccaattaccgttaaaagaaagtccagaatcggcatcacctaaacctgcttgtacatcggtataatgtttacccgcttgcacattcatcgatatggcattggcattagcagaaataagcaatgcgctcattgctcctaataataaaaactttttcattatgattaccccagcaaataattttcccaacttataattatacagcaaatttattaaacaattttactgagaattgaaagtcaatgtttagatttttcaatctatgtaaataagttacatctatcaatactatcggtccaatgggttttattaataattttaatcttgctaaagtggaattacagtaaaatttaaccataataaatataaggctgttcgcttcgttttattcacccatgctattttttaatgttcactattccacaaattggagaagatgtgatggaaaagaaaaagctcacaacggcggctggtgcaccagttgtagataataataatgtaataacagcaggacctcgtggcccaatgttactacaagatgtctggtttttagaaaaactcgcccattttgatcgtgaagttattcctgaaagacgtatgcacgcaaaaggctctggtgcctttggtacatttacggtcactcacgatattacgaaatatactcgagctaaaattttctctgaagtgggtaaaaaaacagaaatgtttgctcgtttttcaacagtggcgggtgaacgtggtgcagctgatgctgagcgcgatattcgtggatttgccttaaaattttatacagaagaaggtaactgggatatggtgggtaataatactcctgtattctatctacgtgatccccttaaattccctgatcttaaccatatcgtaaaacgtgaccctcgcactaatatgcgtaatatggcttataaatgggatttcttttctcatttaccagaatctctacaccaattaactattgatatgagcgatcgtggtttacctttaagctatcgctttgtgcatggttttggtagccacacttatagctttatcaataaagataatgaacgtttctgggttaaattccatttccgttgccaacaaggcatcaagaacttaatggatgatgaagcggaagctctagtaggtaaagatagagaaagctctcagcgtgatctttttgaagccattgaacgtggtgattatccgcgttggaagttacaaattcagatcatgccagaaaaagaggcatcaactgtgccttataacccatttgatttaaccaaagtttggccacatgctgattatccgctcatggatgtcggttactttgagttaaaccgtaatccagataactacttctctgatgttgaacaagctgcatttagccctgcgaatattgttccaggtattagtttctcaccagataagatgttacaaggtcgtctattctcttatggtgatgcgcatcgttaccgtttaggcgttaatcatcatcaaatccctgttaatgcaccaaaatgcccattccataattatcatcgtgatggtgctatgcgtgttgacggtaatagtggtaatggtattacttatgagccaaatagtggcggtgtgttccaagagcaacctgactttaaagagccaccactttctattgaaggtgcagccgatcactggaaccatcgtgaagatgaagattatttcagccaacctcgtgcactgtatgagctattaagcgatgacgaacatcaacgtatgtttgcgcgtattgcgggcgaattatcacaagcaagtaaagaaacacaacaacgtcaaatcgacttatttaccaaagttcatcctgaatatggcgctggtgttgaaaaagcgattaaagtgttagaagggaaagacgctaaataacctgataacaagaagccctgtgagcaactcggcaaaataataaggcgcctgtagtttgggcgcctttcttaaagtcgttcgataaaatcgcaatatcaatttacttgttgccctttcacccactgttgcacttgtttacgagagattttgatccctccattctttagctgttctggtaatagtaaacaagcgatgggacgttgaaagcctgctaaacgcgtatgataccattgtggtaattgattaattgtctcaatatcagtatcaacaacagcaacgggacgttgaccaaattcaatatcgtcaatcgggacaataaatgtttggcgaacattcgggtgactatttagcaccttttcaatatcttctggctgtataccttcacccgcactaaaaaacagattatctaatcgccctaaaatgcaccattccccctctttaaaacaacctctatcccgtgttgcataccaatcatcctgagtctgtgataacggctttaattgaccatcaaaccaatatcctaatgcaacactatcagatttgatctggatttcattatccactaatctgaccgctttaccctttaatggcgtaccaactcccgctttaccatctgcgcgttttgcacaaacagtagaggccatttcagtcatgccataaccacaccaacactgaatacctttactttccgcacattgggttaattcagttgggatcatcgctccccctaataaaacagcttttaatgtgatgggctgcgaactatcctgttgtgtattttgtaataaacgccaaagttgcgttggcactaaagaagcatgagtacagccttgcaaagcagcaataaaggggtgcatattacgcactaccaaggtagcgcctcgtaataaccaacgccaaagaattccttgcccagatacatgaaagagaggtaaagacaataaccaactgtcgcttttttcaaagggtatcaattcaagaacaccttctgcactacaaagatgagcttgaaaagtatgcacagcggctttaggtagacctgatgatccagaggttaagatcagtgttgccatacgagaagatgcccatgcaacacctgccatgttatttttatcttgatgtgatttgttattgaattcgacacctgaaagatcgagtaacctcgcatctaactcaagtgttgatccacttaaatcagcataaaaatcgatgtttaaatggggtaataaatcatcaagtagagacttagggagctgaggatctaacggtaatacttttgcaccgcattgaaaaacagcaagtagagtaaaaacaacatgaatatgatttttaccacgtagcaacacggtacttttagtattaacaccctgttttgctaaatggttcgccaatcgattgatatgacaacttaattgttgccatgttataggtgaatcaccggatatgatggccgtttcatttgggttaagctgcgcccagtgatgccacggccattgtgtaaaattaactactgttgccatactgtcttaagctgttcaagcgtaataagcggaatatctacatctggccaacaacgaataagttgttgtttgataagatcaacggtatctaaaccgggaatagaatctggtgttaaccactgagctactcttgccagttgtgtcaatccaaagctactttcaatactcgagctaataatcgcctctagacctaaagcatgcgcttgttcaacgatagattggcaacgagcaagacttcctactagcgtaggcttgataacaatcgccgtaacaccctcttgagctttcacttcaaaaccttcatcacgcacagtctcatcccaagcaatattgatacctgttgcttgtgaaaaggcgagtgactcttctggggttttgcatggctcttctaaaaatgcaatgcggtcgcgccattgtgggttcacgtacttggcaaaaccttctgctttagctggcgtccaactgcgattggcatcaagccttagttttaagtcggggatcgcctctagtaataagttgacgacaataccatctcgtaccgcttcatacagaccgaccttaactttagcaactttctccccgctcatttcattaagacttaaaattaagtcatcaggatcaccgttgcataaaggtgcggcacgataattggcttcttctggtaaagtgccttcaagctctgctaatgcgcaactaataccaaaagcgacacttggcaattcactgtcagtaggattttcacctagacaccaagctgctagccaagattgtgcggcatcttgtgcttgttctaacgtttcatggctaaactcaggaagaggtgaaatttcaccccaaccttgtttgccattttgctctaaacagacaagaaaaccatcacgcgtttttaatctttggtagcgcagaacaacacctgcctccattggcaggctgaatgaatagagtttggcgtttcgcattatgggttacgtttaaatttagtgaaatcaggatgacgtttttcattaaaagcattacgtccttcttgaccttcatctgtcatataaaacagcatggttgcattaccagccaattcttgcagacccgcttgaccatcacagtcagcatttaatgctgctttcaagcaacgtagtgccattgggctattttctagcatttcacgacaccaacgtaccgtttctttttcaagagaagcataaggaacaacggtatttaccaatcccatatctaatgcttcttgcgcattatattggcggcataagaaccagatttcgcgagctttcttctgcccgacaatacgtgccatataagaagcaccccatccaccatcaaatgagcctactttaggaccagtttgaccaaaaatggcattgtctgcagcaatggttaaatcacacatcatatgtaagacatgaccaccaccaatggagtagccagccaccatagcaacaacaggtttaggacaagtacgaatttggcgttggaaatctaatacgtttaagtggtgagtgccactttcatcacggtatccaccgtagtcaccccggatcttttggtcaccaccggcacaaaacgctttttcgcctgcaccagtaagaataatagtaccaattgagtcatcgtaacgtgcatcggctaatgcttggatcatctctttcacagtcaaaggacggaaagcattacgcacttgcgggcggttaatcgtaattttggcaatgccatcgacagatttgtggtagaggatatcttcaaaaccttcagaacaatcctgccattcaatcggtgcatatagcttttcttcgctcgggtaaagcataattaggttcctttaaccaaagagggataatacatggtttatcaccgcagcataagcatcaggctgtgcctgatgggcattatgaccagcttgcgggatagtcgttaatggcagcgaatattgctgcgctattgattgaaattttttatcttgctcaccacacaaccaaataaagggtaaggtgagttgttgtaattctgcaactaaccaaggctgatggcctaaagagagtgtttctaaactttccgcaatacaaaaacctgcattactactgcgtttttcaactaataactgacgcatttcatcgcttaaatcagcaaagacaggctgttgataccattgcgttaatacatcattaataggttcattgcgaaaacgcgcggcccaacgtttatcatgtgcaatacggttttgtctttctattgcatcatataaacctgggtttcccccttcaacaatcaatcccattaatcccgatgtttcaccaaaacatgcgtgatacatcgcaattctgccacctaaagagtaaccaatcagccagtaatgattaatatcgtattcttttaaagtgtcatggagtaatgcactcatctcgacaaaattatttaccccaatagaggcagagttaccatgacggggcaaatcaatcacgagtgagggatattcatggcaagccttaatgacggtctcccactcatgactgtctcctaatagtccatgcaaccaaactaaccatggcccttcgttatgcgtgttatattgcctacaagctaaagtcataagcggttacctgttttaccaactgatttaaggtttcagcaccctcagtttcattgacaatcaattcaattaatgttgttttggcttccccctgccaacatgcagtcactgtagtaaacagatcatcccaacagtttggtgcaacataatctaaaccaaacatggcagcagcatgtttaaaatttaaagcatggggcatacagtaaaaacgctcccgctctgccataggcgtcggtaacatagagaatatctgcccaccattgttattgacgataatcaccacatttggggcatagacttgttgatgtagtgccaaactatttaaatcatataatgccgataaatcacccaagatagttaacgtcggtttttgagtggctcgatgaacacctgctgaggttgaaagtaatccatcaatgccactagcaccacgattactcataacaggatagccctgtggcaattgtgcaaaagcatcaattaagcgcacaattaaactattgccaacaaaaagctggccattgtgaggaagtaaatgatctaactgatgagcaacttgtgcttcaccaaaatagtctgttacttcagtaacatgttgataagtttgtgtagcaatatgacttaatgacaacgcccaaggtaaattatcaatagcaggatgtgccgttaaccattgactcggggataaggtaaatttctccccttgatgatgccccggatctaaacgtcccggaatagcatcaatcacccaatacatttgcggtgagcaattcgcttgccattgtaataagcgtttgcctgttaaactagagccaaattggatcactatttctgcttggtttaattcagccttcacttgtggattatttagccataaatcagcacaaggtagtggttgtccagtttgtgataacacatcacctaacagaggccatcccaattttgaggcccatttggcaacggcaatcccctctttcgcactaatacgtccagcaataacgaccccttttttctgacgtagtcgatcccattgagggtgtgtagtcacagagggagaaagcgtttcttgtaaccaaggtttatcactttgccaccactttcctaatgcttgtgtccatggtgtgtcatgctctatatcatcaccatataatggctctgcaaaagggcagtttacatgcaaagcaccatgcacaagattattcatggcattatctaatgtagaaaccagccaacgagcagaaatatctgctgtagggcgtggtaaagagagtgtttctgagggatggctggcaaaaataccttgttggcgtatagcctgattggcgccacaattaatcagctcaggcggtctatctgccgtgagaaagatcacccgttcaccagtaagtcccgcttcaattaaagcggggtataagtttgccactgcggtacctgaggtgacaatcactgcaacaggctgttgagtggcttttgccaaacctaatgctaagtgacctaaaccacgctcatcgaaatgcgtatgacaaataagtttatgattggcggctgccgcaagcgttaaaggcgttgaacgtgatccgggtgcgatacagatatgacgtaaaccatgacgagtcaaagtttccagtataactttagcccattggcgattaaacgaactattagacattgatcatcccaataacgaaaacctgcaatgactattataatatctgttcctaaatacttttccttagcctagttcaatgaacagaagttttcgttaaataaatcgtgaaaaagaactctgataagagtgtattatttaagctaaagtacttatctttttaggcttaatttttatcgttaacaaaaagatagcaataacactagctagcacaagaataacattaatttattaacaagatgcagtgacgagttgaaagtagcactaaatggcatcctaatcagtactacttatcaacacccagtttatatattatgagagccattggataaactgcaaagaattcaacactctttttctaataaagtgcgtaaacctgctgctttattttcaatttcagcccactcttgcaaaggatcagatcccgcaaccacccctgcgccagcataaagcgttaatgcatcatcatgcaattcaccgcaacgcaggctaaccgcaaattcggcatgaggcaaagacaaatagcccgcagagccagcataccaacggcgttcaaaaggttcatgttgacgaataaaagtgcgcgcaatagagcgcggtaagccacaaacagccgcggtaggttgtaaacgctgtaaacaatccacatcatcagcatggataagtttaccgtggatatagcgacgcagatgttgcactttacgtaagcggatcacatctgctgatgatacatcaatcccttctatcccaccttgtaatcgctgacaaatatcatcaactaccaccagattttcatgttgattttttttatcgttcattagccaatcagcaaatgctatggcctgttgttcattatcagaacttgccacagtgcccgccaacgcttcggtataaagcacaaattcatcgcgtttatacaatctttctggtgatgagcccataaaagcatcagtaggtgaaaaagccagcatataatgatagcaatgatgattaacatctcgacttgctttcataaattgaatagcttttaacggattatctaagcttaagcaggttgcccgtgcaggtactactttttcaaatacgccttgattgatttcatctaaagcaatattaagatagtcagtccattgctgttgcgttaacgagtgctctacagatgttactttgacagataaaggtgcaatattcagtgcatttttaagtgagcgaataaaagcaagcgcactttgcttatcttcttctgccaataaattaatatggatcgacagttgttgctgacgtcttatttcaatacgaggtaaaaaaaggtaagcatcatcccccctttctttatcaatacgccctggaataatggtatcccacgcgtttaatccccaaatacgcacatcatcagcatgcaatgaatgccgatgtgttgctaaaaatcgatgagcatcacggatatgattaaagcacttaacttgtccacaaacggctacttcttcgctttcatcacgatgttgccaataaaattgcgggtaatacgtttgtgctgctagccatgaaagtaaggaaaatgacacctctgatggcaagataactttcaaatgtaaaagatcatcttgtgctgtcagatttatatttttaactttttcgtacagtgtcgaaaacacaggattaaccttttccactctaaatacctactactaatgaaaagaaagattatacgtctctataagaattatcaaagtgctgattaattataacctttgtcatttatcaaacttttgttgttttcatgttacaaaggagaagcattgaccagataatcgcaaatggaaaacagatcacttctaaattatgccttaatcataacaaataattatacataagagaggttatatggatacaaccacccttgatcatatagataaagtgattgaacaataccaacttcccgaagtcactcttagcttaattctaggtaaaaatatcgatcatggacgtagtgcgggtatttttacaccttatgatcttaataaaatcaaatcttatattgataaagtattaaaattaccttatcaaaaagacactattattgaattattaggctacgaagatattaacatttcccaaatatcagctgaaactattcaaaccctcttcttaaatatgagaacacatgcctttgaatggcaaaaaattgaatactcagtaaaacagcaagctattgatttagagatcaccggtagagaaatcacgagtacaggtgagcaactattggcatttattaataaaatgccaattataaaaaaaataaataggaaaattgaagatatcacaccagaagaactcagttcaataaaatattcaacacaagataaaaaagtgtctaagcaacttgttgccattttagaaagcatgaaaaatgatattaatgagcaatataataataccttaaaaataaaaaacatgatttatgattttagaatagaaattgtgggaggtgaaaatagtaaaggtaatatatgtcattcaatttattatgatatcattaataaaaagaaatatattaatgatttttttgataatagtgatgactcactaaatgaacagagaattttattagaaaatgaaattgaaatattaaaaaaagagtatcaacacttcgtgaaactcgcctttacggggttagcattcggtattattggtgtgatcattactggagggatctttggttcaaaagctgaaaaaatccgtaaaaaaagaaatgaaacaatagagaaactacataatatcaataaaggaataaaacaacaatcaactatttctgagtgtttacaacgttttcaagtcgatttagacgaaatagaacaatatattgaagatgctgatatgtctgtggagcatcttctttatatgtggcaaacaattttaactgaaattaatgcttcattaattaattttaaaaaaattgataatgcaatggagttaattagatttagtatttatttagaaaaaatcattgcaccttggtatatggtggtcggttactcaaaggaaatgatggcggtatttgatgaagctttatcctctttttattcatctaaataacaaaaggaaatgttatgaatagcgtaacttcgcaattacaggaatttgattgcaatcaatttttccatactattaaatcaattagaaaaataacttctgaactatttgaacatgataatatcttaaatcataatcttattaccatatcaataaacaataataaaatttatgatgaaataattattttctctattctgctaaaaagccggctaaaccagaaattgttaacagggatatttaaaaatattaatgaaattaatcatgcaatggctgatagagagttaacacagcaattatcagaaaaactgctccaagagaaaatgtttattgagcagttatttaaagatgaattaactgaatctatagaaattatagaaaagcacatcagttttattaatgataaaaaacagctcttaacaaccaccactattattagtgaaatagataaattaattagaaataaagaagaaatatctattgaaatcaatgagaaaatagccaagcaaaagttatcgattaatgaaattaaagaacaactcgatataattactaaaagtgaagatattatttataataaaaatatcctcgatttttttacctctcacctgccaagtaaacagacaatttctaaactgcagttggcttcttcagaaaaagatattctctctgtttttatcgatctgctaaagcaattttttacccatctggagaaagggttttcttaccaaaaactggtagagacacgtcatactcttattgataactatttgatacagataaaaaatctaaccaaactagaacagaaaaaacaagctctcttatttaccctaagtcgttattatgcagtcacagaaatcaatcaatatattgatatgttaaatcaacaattatcgctattagagcagtattggcatacattaatagagcaactgatacaattaaaacgcaatctttccgaggcaaaaaccgtgctctcacctcatcttgtattccttaatcacttttcacaccattatcaataatattttcactagccagacatcataacccccttaaaacagggggtatgattggtatagtagatatagaaccgttcaatataatctggtgcattcactcggtataagcaacaacatcataaataaattcaaagtccataatggtatcgactttatgaataaggtcatcttcaggaacaagtttatcaagggggattgttgcgaacaaaaattgctgggggaaggtattcttttaacatatcggttagctcactatttgtactaacctgagtagatcaaacttctaactaaaagcgaggacttttccgtagtttgaagagcctgataaaatatcaggctctttatcataacaacgggcagataaaaattaatttatcgcaggtgcaatgattgcaaaacgtgtcagctcaatcaatggttgtggccatacacctaatacaatcacgataatggcgcaaactaaagtaattaatgttgccatattttgtgatgtggtcgtaaccgctggtgcattatcgttatctggtttgcgtaagaaaacgatagctgcagcacgtagatagtagaataaacctatcgcactacctaacactaccatgcctgttaaccaccacaaacttgaatcaataccagcaagaataacatacagtttaccaataaagcctaatgttattggcacccctgccagtgatagcatcattaatgacatcacgacggcagcaacaggacgacgccagaaaagcccacgataatcttcaagagactctaattcacctttattgtacgggctagaagccacagcaatcgcaccaaatgcacctaaacttgcaaagagataacctgctaaataaatctcagcggtttcttgtgccagtatagggctatattgcaagacaattaatgcaaccagtaaataaccaaggtgagagacagaagagtaaccgagtaaacgttttacgttcttctgagtcagcgccatgatattaccaaacaggatagaggcaatagccataaagcctaagatcatgcgtaatgtttcgctatccgccgccggtgcttcaaggaataagcgcatcactaccgcaaatataccaatcttgctcgctgtcgctaaaaatgcacctgttggtgctggtgcaccttggtatacatccggtgtccataattggaatgggaataaagagagcttaaaaccaattcccactaacatcatgcctaacccagcaagtactaatggtttatggatattgctatcacttaaactttgccccatcgccgtaaaggagagatttcctgcttcagcataaagtagtgccataccaaataacaagaaagaagaggccgccgcagaaagcagcatatatttaatgctcgcttccagtgaaggacgttgttggaaagcataaccaatcagaccaaataacggcaatgttagtaactcaataccaataaacattgacgccaagtggtgcgcagaagagagtaaaataccgccaatgacagcaatcgccaccagcatataaaactcttctttattatcttgatagccttccaaccaaggataagcaaaagcaaccgtacctaaaccagcaataatagttaatgccgtgaaaaagctggaataaccatctacatggtagagggtggtcacatcaactacgcctaatgcattaacgtagtaaagtgatccgagagcgatgataaaaccagttgctgtcaaggtggcaatagtaaagtgatcgcgtcgccacgcaatggacagcatcaccaccaccaccgtcaagatgacgactaacagcggtagcattgcgatcaattgttcaggagttattgtcatggcgaattacagccttactgttgaaagagaagcggaataccaagtctggagattttccattgctgatatcgaagtatctaatactggttgtgggaagaagcccaaaataaccaataaaaccaccaagataaacaggatcaaaaattctctcagatttaaccctttataggttctttctgctgttttcggtgaaccatagtaagcctgttgcatcatccacaaagcgtagacagaagcaaaaactaacccaaagaccgaaataatagtgatcagcttaaagtggccataagtaccaaataggatcataaactcaccaacaaagttacctgttcctggcatacctaaagaggcaaccgcaaagaacagtgaaaatgctggtaagaaacggatgcttttccacaatccacccatttgattcatatcacgcgtacctaaacgctcatacagcatgccacacatgataaacagaccggcagcagacaaaccattggtgatcatttgaataatcgcaccttggtaagccaaaacagagccagcataaatcgcaatcacgataaagcccatgtgagaaatactactgtaagcggccagacgtttaatatccgtttgacggaatgctaacagtgcagcgtagaatacggtgattaagcctagccacatcgcaacaggtgccagtaatgcagacgcttctgggaataacggtaagttaaaacgtaataaaccgtaagcggctgtttttagcaaaatacctgataagtcaacagagcccgccgttggtgcttctgcatgtgcatcagctagccagccatgaacggggacaattggcatttttactgcgaatgcagcaaagaagccaagcatcagaataaattgcagttcactacctaataaggtgtgcgcttgtagtaaggtgtcataattaaacgtccaaatacctgttttgctgtaaaaagcgacagctaaaccgataatggccagcaacattaacaagccactcgcctgtgtataaataaagaacttagttgctgcactaacatgtttctcatcactacttcctttatgtccccaaagagagataaggaaatacattgggatcaacatcatttcccaaaagaagaagaataagaacaagtcagtcgctaagaatacccccataacacctgctaagatccacagcaggttgaaatggaaagccccttgtgatggttgattttcgctccatgaagagagcaccgctaaaatacctaaaatagcagttaataccaccatcaataatgacatgccatcaagtgcaaactgaatattaatccccaaagcagggatccacggtacaaagtaaaactctgtccagcgaggtgctccatcaacactaatcagttgatagtcaccttgcaaccacagttgcacagaaataacgagtgttaatcccatcgtcagcaacgcaacccagcgaggaacttgcgagccgattcgttcagcctgccaacttagcaggccaccgatgaagggaataagtattagccagggtaataacatggcgcaatgtgtcccttaattaaaccagaagcagcagagcgataaccagcactgcacctaaaccgagagaagccgcataccaacgcgctaatccgttttcactgaaactcaagcctttattggcgcctttaaagagacaaccaaagagattaaagaattggttaacaggatcattttggataagccatgccgcacctttataaggtttgacaaacagcacctcatacagtgcatcaaatccccatgcgtggaaccaccatgttgagaagaaacgccctgttttggtatttgccacctgagaaacaagttgacgctgtttcaggtataaccatgctgcaatggcaacgcctacaatcgctaccacaccagaaaggatttctaatacatacttaccttcatgagtaacggtgctttctgggaaaacatcgcctaacggttgggtaattaacgccccaataaaggttgataacaacgctaataccgctaatgggaaagtatgagtgaagcctttaacttggtgtgcttcggttttggtttcaccatggaatacgatgaaaattaaacggaaggtataaagtgacgtaaagaatgcgccaattaaacctgctaacattaaattgaaatgtccgtttgcgtacgcaccccataagatttcatctttactgaagaaccctgctgttaacagtggtaatgctgctaaagcacctccaccaattaaaaagcatgcataaacaaatgggatcttcttacgtaacccgcccatcttaaagatattctgttcatgatggcaggcaataatcactgaacctgcagataagaacagtaatgctttaaagaatgcgtgagtcattaagtggaaaattgcgccatcccatgcttgagcacccaacgccaagaacatataaccaatttggctcatggttgagtaagcaagaatacgcttgatatcggtttgtactaaagccgcaaaacccgctaatactaatgtcactgcaccaacgataccgactaattctaagatatcaggtgccattaagaatagcgcatgactacgggcaactaagtacacaccagcggtaaccatggtggcggcgtggatcaacgcagaaacaggtgttggaccggccatcgcatccgctaaccaagtttgtaatggcagttgtgctgatttacctaccgcaccccctaagaccattaacattgcccagttaatgatgcttgatcctgcggtcagttgttcaggagccagtaccgccatttcgcggaaacttagcgtacctaattgatcaaacaggataaacataccgatagctaagaagacatcaccaatacgggtaacaataaatgctttcattgctgccgcgccattagctgggttgttatagtagaaaccaattaataagtaactacataaaccaaccccttcccaacccatatacatcagcatcatattatcagccaatactaaaacaaccatactcgcgataaataagttggtataagcaaagaagcgagaatatccttcttcaccacgcatataccaagatgcatacatatgaataagaaaaccaacgccagtgataacacctagcatggttaatgataggccatcaagcaccaacgtaaatgggatagtaaagttccccgctgacatccaagtccagagtgttaagacttctgtttcttgtccgtgagcaaagaaatctatccccacccaaagtgtcactaaagctgataaaccaacagcgcccgtgccaatccatgctgatacattttcagaccaacgaccacctgagaatgcgagcagtaaaaatcccagcagtggtagcacaaaggttaaatagagtatattcatccgcgcatctcactgactgtatcaatattgaggttttggcgatgacgatgaagttgtaataacaatgccaagccaatacttgcctctgccgctgccaaactgattgccagaatatacataatctgaccatctgtttgaccccaatagctaccaccaaccacaaaggctagcgcagctgaattaatcataatttcgagtccgatcaacataaataacaggttgcggcgaagtactaagcaagtaaaacctaacacaaatagtaccgcagccaagatcaaaccatgttgaagaggtatcattttggctcccctactttttcgttttcgacgagatcgtcatggctctgatcacgaccgatgtgataagcaacaattaatcctgacaataagagaacggaggctaactcaacagccagaatataaggcccaaataagctaataccgacttctttcgccccaataatctcgccactaatctcaccatgagtgacactactaattgcataaaccaatacaattaacagtaccagagacaaaatcgccggccctatccaaaatctaggctgtaaccattttctctcttgctcaacgaccgattttcctaagttaagcatcatcacaacgaatacgaatagcaccataatcgcgccggcgtaaacgatgatctctaaagcacctgcaaaataggcacctaacgagaagaacaccactgaaaggccaattaatgaaacaatcagatacagcagtgcgtgtaccggattggtatgcgttattactctcaaagtggcaaggattgaaatcagtcctgcaatatagaatgcaaattccatgaatatcgctccttacggtaacaggcttttgacatcgataggtttcgcttcatcatctgcttcacctttatctttgccattaatcgccatacctgttttacggtaaaagttatattcaggatatttaccaggccctgaaattaataaatcgtctttttcataaaccagatcttgacgcttaaattcacccatttcgaaatcaggggttaattgtagagccgttgttggacatgcttcttcacataagccacaaaagatacaacgcgaaaagttgatacggaaaaactcaggataccaacgaccatcttcatgttctgctttttgtaatgagatacaaccaacagggcacaccgctgcgcacaagttacaagcaacacaacgctcttcaccatcaggatcacgggtcaatacaatacgtccacgataacgcggtgcaacattgacaggttcttccgggtacatctgcgtttcgcgtttggcaaaggcgtgtaagccaatcatccaaatgctgcgtacctgggtgccgaaaccagtcactaactcttttaaagtcatggttcaatcaccccttattgagcgttgtagaggatcactgcagcagtgaccaacagattgattaaagttaacggtaagcagatcttccaaccaaaagccatcacttggtcataacgcggacgcggtaatgatgcacggatcagaataaacatcatcatgaagaatcctgttttcagtgcaaaccaaacgaatgacggtaagaaaggaccttgccaaccaccgaagaataacgtcactattaagccagaaacggcaacgataccgatatattcaccgacaaagaacagaccgaatttcataccggaatattcaatgtgataaccatcagccaactcttgctctgcttcgggttggtcaaaaggatgacggtgacaaacggcaacgccagcaatcgcaaaggtaataaagccaaagaattgtgggataatgttccacatatgggcttgcgaattgacaatatccgttaagttaaacgaacccgcttgtgccacaacacctaaaatagaaagtcctaagaaaacctcataactaactgtttgtgctgaagcacgcattgcacctaataacgaatatttattgttacttgaccagccagcaaataaaacggcatacaccgctaaacccgctaccatcaagaaaaataaaataccgatgtttaaatcagccacaacccaggttgagctaactggcacaatagcaaatgacaataataaggaagaaaaggcaatcactggtgctatggtaaagataaagcgatcagcaaattttgggatccagtcctctttaaagaacattttgatcatatccgcaattaactgtgctgaacctgcataacctacacggttaggcccataacggttttggaataatcccagtagacgacgctcccccatactcataaaagcaccacaagtgacaaccaccagcaagatcaccacggcttttaaaacagtgagtaaaatctctgtaacttcaggagataaccagctcattatgcaataccccgcagttgacgaaccgatacacccaccagtgatggcgaaatgccagccatccctaacggaaggccaatttgacctcgggttaagtgagcactgattttcacaggtaaggtgaattcacgaccttcgtaagtaaacatcgcttgttgaccttgagataatgctaatgcgatggcatcagattcactcacggttaaataagcgttgtccatacgttgttggatcacttgtgaacgttgcgataactcttcgctaccaaacagacgatagtaaggagctacaacccattgattttcaactaggttaaaggctggtggaatatcagtgaaataacctaatgtgttatcactgcattcgattaagcgtacacccggatcaccaaaacgtaagcttcccccgacttcagactggaacttattccatgcttgtggtgagttccaacccggtgcccatgcaaatggaatttgctggcgaggagccgttggactgttgtttccttccatagagaaagcaaatgggctatcgatatctttaggttgacgctgttcatgtactgaaacatttgccaacatggaagtacgaccactataacgatgcggttcacgggctaatttttgaccacgaatacggaatgatgcattaggtgccgcattcacaataccggcaaattgcggtagacgcgttgcacatagctcaatcacatgatctaactgcgtccagtcaagattaccttcatgccattgtgaatcaacagcacttagccaacgccagctttcatgcatcaccacttctttgttatagaaagaaggttcaaacacttggaagtaacgttgcgctctgccctcttgactcaccatagtgccatcactttcagcaaaggaggaagcaggtaacacaaggtgtgctttttccatgatctcagtttgctgatggtcaatcacaattaggtgatccactttagcaatcgcgtcatcaatgacgtcggcggcaaaatggcgatacaagtcgttttccatcacaatagcgctatctgcttgaccactacgcatcactttcaatgcgtcatccagtggtttcgctttcatcatcgccagccccatgctattggcatcatctgccacataagagagaccaacttcgctccccttggcttttaaggcaaaagcgatattagcagccgctttgataacctcttcgctacccgcatgactaccactaatgattaacggttttttcgcttgcgataaggcttgaacaatcatgtcaatctgtttattcaatgcttcatctaagccatcaaccgcaggggcttcaccattaatatgatgagcaatggcaaaacctaaacgcgcttgttcaaccaccggcgcacgataactccaagcggcaacatcatccagacgagtttcatcaacatgggtgacaaacagtggatatttcgcccgttgaccgatattcatgatggcagcaatttgccaatcagccactttttgtgcggctgccatctcacgtgctttaccttttacggcttgacgtactgacagtgccatacgagcacctgtctgtgttaagtcttcacctaacaccagtactgcgtcatagtcttcaatctcacggagagatggagtataaacgccacctttttgtaaaatatccagcattaaggtcaagcgagcctgctctgcagctgaaataccactatagaaattttcagcaccaaccacttcacgtaaagcaaagttgctttcaatactggctcgtggtgagccgataccgacaacacgttgccctttcttcagcatttctgcagcggcttgcgttgcttgtgctgcactgatttcaagccagttactgcctaaacgttttttaggttgacgaggtctactcgctaaattgacataaccgtagccaaaacgaccacgatcacaaaggaagtaacggtttactgtaccgttataacggttttcaatacggcgcaattcaccatagcgctcacctgggctgatattgcaacccatgctacaaccttggcaaatactaggtgcaaactgcatatcccacttacggttataacgtgatgagtgagttttgtcagtaaagacacccgttggacaaatctcaactaagttacctgagaattcgctctctaatgtgccatcttcaacccgtccaaagaacacgttgttatgtgcaccaaagacacccagatcagtgccatcagcataatctttgtagtaacgaacacagcggtaacaagcaatacagcggttcatttcatgagaaataaacggccctaactcttggtttctatgtgtacgcttagtaaagcgatagcgacgcatagtatgacctgtcataacggtcatatcttgaaggtggcagtttcccccttcttcacaaacaggacaatcgtgaggatggttagtcatataccattcaacaacgctttcgcggaattttttcgcttcttcgtcatcaatggagataaacgtgccatcagccgcaggtgtcatacaagacattaccaagcgaccgcgggtatcctcagcattttgatactgcttaaccgcacactggcggcaagcgccaacgcttcccagcgctgggtgccagcaaaaataaggaatatctaagcctaaattaagacaggcttctaacaggttatcagccccgttaacttcatattctttgccgtctacatgaatcgtagccatagtcagcatgcttcccaaaggcctgcattgcaggcgttaaacctagaatgtatcgtgaaaaactaccagcggcttttcagcaagttaggctgaataccacggataagattggcattggtatagtcttcttgaataatgccagcctcaaattcttcacggaaatatttgattgcgctttgtaaaggctctactgcccctggtgcgtgagcacagaatgtgtgccctgggcttaaagagcggcagaggtgctcaagagtctcaatatcaccaggacgaccttgacctttttctatcgcgcgtaagatttcgacactccatggcaagccatcacgacaaggtgtacaccagccacaagattcacgcgcaaagaactcttccaagttacgggttaatgaaaccatgttaatttcattatctaccgccatcgccaacgcagtacctaaacggctaccagctttggcgatcgtgccaaaatccatagggagatcgagatgatcttctgttaagaaatccgttcctgcaccaccgggttgccaagcttttaatttcagcccatcacgcatcccccccgcataatcttctaagatttcacgagctgtagtaccaaaaggtaattcccataagcctggatatttcacgcgaccagagaatcccattaatttagtacctgcatctggacttttaccggcgcttaaaccgatataccaatctttgccatgctcaataatcgcgggtacgttacacagcgtttcaacgttattcacgcaggtaggttttccccaagcaccggaggttgcagggaatggcggtttcgagcgagggttagcacgacgaccttccagtgagttgatcagtgctgtttcttcaccacagatataacgacctgctcctgtgtgaacaaatagctcaaaatcgataccagagccgaagatatttttgcctaaaaaacccgctgctttggcttcttcaatagcatgacgcaggtgcttagccgcttcaatatattcaccacgtaggaaaatataaccacgataagctttcagtgcatgcgcaccgataatcatcccttcgattaacagatgtggcagttcttccattaacaggcggtctttataggttcccggctccatttcatctgcattacaaaggatgtaacggatattcatactttcatcttttggcatcaggctccatttcaagcctgttgagaatccagcaccaccacgtccttttaagcctgcatctttaacttcagaggtcacctcatcgggtgccatgctttttaatgctttttctgccgctttataaccgttttttgcacggtattcatccagccatactggctgacgatcatcacgtaagcgccacgttagcggatgcgtttctgcgctacgaataatcggttttgctcctgaaattgctgtcatggatactgctccagtaacgtttcaatctcttcaggtttaacaaaactgtgagtatcgtcatctaccatcatagtaggacctttgtcacagttacctaaacaacaggttggcagtaaggtaaaacgaccatctggtgttgtttggccaggaaggatattgaggtgcttctcaatagctgcctgaatgccttgataacctgtaatatggcaaaccacactgtcacaaaaacgaataatgtgacggccgacgggttggcggaaaatttgactataaaaggttgctaccccttctacatcgctagccggtataccaagcacatcggcaatagcatagatagcaccgtcttcaacccaacctcgatttttttgcactattttcagcgcttcaatcgatgcagcacggggatcttcatagtgatgtttttcttgttcaatttcagcacgctcttcttgcgttaaaacaaacgtgtttttctttgaatgagttacatcaacgatttcaatcttcgcggcatcctctttatggtttaattcattttgcatgattaacgatccacatccgacattacaaaatcgatacttcccagatagacaatcaagtcagaaaccagactaccgcggataaccgctgggatttgttgcaggtgagcaaaacttggcgtacgaatacgcgtacgatagctcatcgtgctgccatcactggttaaataatagctgttgatccctttagtggcttccaccatctggaatgattcattcgcaggcataacagggccccatgaaacctgtaagaagtggttaatcatggtttcaatatgctgtaatgtgcgctcttttggtggcggagtcgtcagtggatggtcggctttaaatggccctgctggcatatttttataacactgctcgagaatacgtaagctttgacgtaattcttcgactttcagcatgacacgatcgtaacagtcaccattgcttgccactggaatttcaaactcaaagttttcataccctgagtatggacgccatttacgcacgtcaaactcaacccctgtagcacgaagcccggcacccgttaccccccaatctaacgcttctttagcgttataagaggcaacaccaatggtacggccttttaaaatgctgttttgcaaggcggctttaacgtaagaatcaagacgttttggcatccaatctaagaattcacgtagtaagcgttcccacccttttggtaaatcgtgggcaacaccaccgatacggaaccatgccggatgcatacggaaaccggtgattgcttccacaatatcgtaaactttttgacgatcagtaaaggcaaagaataccggtgtcatcgcaccaacatcttggataaaggtactgatatacagtaaatggctattaatacgaaatagctcagacagcatgacacgaatgactttaacgcgctcaggtacttcaataccggcaagcttttccaccgccagtacataaggcatttcgttaacacaaccaccaaggtattcaattcggtcggtataaggaatataactatgccatgattgacgctcgcccattttctctgcaccacgatggtgataaccaacatcaggtacacagttgacgatttcttcgccatcaagttgcaaaataatacggaatgcaccgtgagaagatgggtgattaggaccgaggtttaagaacataaagtcctcattctcagtaccgcgtttcattccccactcttctggtttaaaggtcagtgattccatttccagatcctctttctgcttagtcagcacataaggatcaaattctgtcgcacgagcgggataatctttacgcagtggatgaccttcccaattcggcaacatcataatacggcgtagattagggtgtccgttaaagacgatcccaaacatatcccacacttcacgctcataccaattcgagttcggaaagatagaagtgagagtcggtagattaagatctttttcacttaatgcgactttcagcatgatatctttattacgatcgagtgatatcagatgatagaaaacggaaaaatcagctgccggcaagccttgacgatgcgtgcggacacgctcatcaacgccatgcaagtcgtacagcatgacatatggttttggtaaagatttgaggtattgcataacctcaataagttgttcccgcttaacccataccactggcatgccggtacgagtcggctggaatgtaaacgcatctggcccaaatttctgacgcagttcgttaaccacctgatcatcaatatgatcgctggtttcccacgctggccgtgcgctattttgcgctatctgatcggtcatttctattcaccacaactttgatcagggttactatgatcgcaacacattgctctggttacgtcttaggcaaaagcctttaaatttcgtctggagtacgcagattttttactgcgatccgctcaccgtgttttctttctcgttctgactgcatattggcacggtaaacgccttggtcgcccaccacccaagataatgggcgacgttctttaccaatggactcttgtaataacatcaatgcttgcatataagcttctggacgaggtgggcatcctgggatatacacatcaacaggaatgaatttatcgacaccttgcactaccgaatagatgtcatacataccaccagagttagcacaagctcccatggaaataacccacttaggctctaacatctgatcgtataaacgctgaataacgggcgccatctttgtaaagcaggttcctgcaaccaccataaagtcagcttgacgaggggaagcacgtaatacttcagaaccaaaacgcgctacgtcatggaccgcagtaaatgacgtcaccatttcaacgtaacaacaggaaagaccaaaattatatggccataaagagttttttctgccccagttcacaacgtcatgtaacgcatgttccagttttcccatatacacgctgcgatgaacgtgagcatctaacgggtcactgacaatttcctgtgattgcaggggataacggtcattctcaccgttcggatctatgcgggtgagcgtataatccatttttaatgcctcgcttattactgctgcggatgtttgccgctggttaatctgacatggcttttacccgcggtttcacggcgagagcgaactggtgtccaatttaatgcaccaatacgaaccaaatagaataatccagctaataaaattgcgataaagacagctgcttcaataaagcctaaccagcccacttcacgtacggaaacggcccaagcataaagaaacagtgcttcaacatcgaaaattacgaaaaacatggcaactaaatagaatttagctgacatgcgcagacgagcgctgccaacggaatcaaggccagattcataaggaacatgtttagcccttgcttgtgcacggccgcctaaatagcgggcacccagcaacatgagcgaacataaccccaatgcgcctattaagaagacagcaaatgcccaatagtgggcgataacttcggtggtcgtagacatactcattgcttactcatcaaaggtggtgtcaattaaccaactcttatccggcggtttacaccacatttattaatacgaaaaaaaaggtaaaacaacagacttgctaattaaataaatgataacaatctatttaaacctttcttcttttaaggaaaacattgtgataactcactcagttttccgtcgcttcttaacaaatttaacactcatttttaacacccaattactggccaatgctaaaacgtgtcagtcaacctacaaattttctgctaacacgcttagtctaaccgataattcgattttactacaccagtatctcaggaaaaacctgactctatataggcaaatgtgccttatttttttgatcaaactcacaaaatagtcgaaaaaatacataatcagtttaaattttatccaaattttaacaaattaactttccaataatgtggagaaggtcaaatatccgttttcatttgactatttattccctgaaaacctagacaaaccttttatttgttaacaatttctacaagcgtgtaacccatcacaactgcatacaattttttaacaaagcgactgagcgggaaaagagaggtggatcacactgtgatatacattaatctctataaatattaaaccaatgtgactatttaaaaataaagcataaaaaaacggaaacaaatgcgtttatagcacctgtttccgttgattgtgatatatcactttattgtttcgtttgactatttttaaccgttaatatgggttatccaaataatcatgataacaatatcactctgcgccttactctaaatctaaagaatgcgcttcttcaactgaagtgacagtataaggcgttttcttattttcgatggcattgaataccgttaatacagcttcgttttgctcatcaaaattacgatataaccagtactgagtctcaggcaaacgaggtaacccttcactttcgcctaatatacgtaaatcagcattttgcatttctaatggacgagctgtgatccccacttcggcatttacagcagcacgaaccgcagataaagaagccgcttcatacgcaatacgccattgaatacctgcgtcatctagtgtatttgttgccaactgacggaatgggttagtttcgtccatgaccactaaaggaataggctcattcatttgtaattggaaatcaggggcacaatgccacaaaacaggcgctgtacgtaacgctgtgcgtggatgatgtccaatacgtgcagtagttaatgctaagtcgatttcgtggttatcaagcatagtctcaataaattgagaacgcttaatacgcacatcaaccgctaaacgtggatatactgatgcaatacgatttaacaaaaatggtagtagtgtatcgacggaatcatcagatgcaccaatacgtaactcaccttcagcatcgctatatgttaatgaagcagttgcatcatcattagcacggagaatttgacgtgcatagcctaataattgtaagccatgctctgttaacagtttattacgaccatgacgggcaaagagttctctgccgactaattgctctaaacgttgcatctgctgactgactgcagattgagttcgacatacagcggccgcagcggctgcaaaagtattcaaatctgctacagcaacaaacgttctaagcagatcgaggtcgagattcattatcggacgatttgcattaatcattgtttattcttcacttatttttgatttttaaattacatatacctggtgttttttatcaaaagtctaaattggacttccgattcagacagtaccttactctgaaaaagagagcaaagacatactgaatactttacatttgtttgttgtcgtttacacctcctagttcgcaagcaactgcatttttttgtaacaaattaaattttattatcattctaaggatctacaagaaagaactgtataccatcattacaagttagatgtagatcatacaatgctctctaggaatacataaattttaacatttttaaaataatttaaattaccttaactgtgtatgctattttaagtatccacccttataaaatatatttaagatttcaatttaatttatataaaaactatttgattgatatgaataaaaatagatttaaccatattatttgaaaatttaatatattaagtaagataatacaaatccgataaaattattcaataattgattatgcaacatcttatcaacgtccctctcacatctggttattgttaaaaaacgcactaaaaaccctctcttcaccagcataatgtttttgatttttattcaaagtaagaacataccaccagattaagtgatactttcagtcatcaaaataagttctttagaataaactgaccttttacaccaaaaattatctagcatcttcaaaagtttgtagtgtaagagtagagtgatagaacagttaatttgctgggacagccttttcatttatatcttcccgagatgtgtatgagaaatataaatgtcgctatgtagataaagtcatacccgattaggtaaacgtgctatgaatcaaataaaaaaatcaagtaaactcgaccatgtttgttatgacattcgaggaccggttttgcaagaagcaaaacgtctggaagaagaaggtaataaagtattaaaactcaatattggtaacccagcacctttcggttttgaagcgccagatgaaatcttagtagatgttattcgtaacctacctagctctcaaggctatagcgactctaaagggcttttttcagcacgtaaagccatcatgcaacattaccaagcccgtgatatgcgtgatgtaactgttgaagatatctatattggtaacggtgtttcagagcttatcgtacaagctatgcaagcattattaaatgatggcgatgaaatgctagttccagcgcctgattacccattatggaccgctgcagtttctctttctgggggtaatgctgttcattacatgtgtgatgagcaacaaggttggtttcctgatttagatgatatccgtcgtaaaatctcccccagaacgcgcggtattgtgattataaaccctaacaatccaaccggcacggtatatagcaaagagattttgctggaaattgttgaaattgcccgtcaacacaatttgattatttttgctgacgaaatttatgacaaaattctttatgatgatgcccaacatcactctatcgccgcaatggcacctgatttattaactgttacctttaacggtttatcgaaaacctatcgtgttgcaggattccgccaaggttggatggtacttaatggcccgaaaaaacaagcaaaaggctatattgaaggcttaaatatgctggcatctatgcgcttatgtgccaacgtgccgatgcaacacgcgatccaaacggcattgggtggctatcaaagtatcagtgaatttattctacccggaggccgtttatacgagcaacgcaaccgcgcatgggagcttatcaatcaaattccaggggtttcttgcgttaaaccaatgggagcgttgtatatgttccctaaaatagacttaaatcgttatagtattaaagatgaccaaaaaatgatcctcgatttactattacaagaaaaagtcttattagtgcaaggtactgcatttaactggcctcaccctgatcatttccgtattgtgacactccctcgtgagaatgatttagagatggcgattcaaaaattcggtcgttttattgtcggctaccatcaatagttattattaataaagataaaacgcaatatcactgaggttatattgcgttttttattttctttctgatcaccgtttacatctagtgtctatccactcacaataatctcttcaatcacgctattgggagatattatgagttacttttttgcccacctttctcgtttaaagctaattacacgctggcctctgatgcgtaatattcgccaagaaaatgtctctgagcatagtttacaagtggcttttgttgcccatgcattagcggtgattaaaaatcgtaaatttgatggcaatgtcaacgccgagcgtattgcactacaagcaatgtatcatgatgccagtgaggttatcaccggtgatatgccaactcctattaaataccacaatccacaaattgctcatgaatataaaaaaatagaaaaatatgctcagcaaaaattgattgaaatgttacccgaagagttacaagaagattttcgccctcttatcgatgagcaattacatagtgaggaagaaacgtttattgtcaaacaagctgatagtttatgtgcctatttaaaatgccttgaagagttagctgcgggtaatagcgaatttaatttggccaaaaatcgtttagaaaaaacgttagcagaaagacatagccctgagatggactattttatgcaagtgtttgtaccaggctttagtttatccctagatgagatcagtgaataagtagcaaaaacgccgtttagccgtttataataaatgaaactaaacggcgtttttgcaaaagataaccgattaaaatgggaataatagcggtattaagaaaacgctaatcaacatcacaatgatggtaaaaggcacccctattttaataaaatcagcaaatttataaccaccaggctcaaggatcagggtattaaccggggatgatacaggtgtcataaacgccgccgatgcagcaacaccaataaccattgcaaaaggtaacggagagacattcatttgatgagctgctgctattgcaatcggtgccattaacaccgccgttgccgtattagagataaataaaccaatagtggcacaaagtacaaataaacagactaacataacctgtggccctgcattccctgctacatccataagtccattaacgataagctcgatgcccccagttttttgcaatgcagccgcaaaaggcatcatcccgacaatcaagataatacttggccaatgaatagaacgataagcactttccatatctatacagcgaaattttcccatcaataagcaagcaattaacgcggcaataaagttaggtacttcattggtcaccattaatgcaaccattaatgctaatgaaaaaagtgcatgtggtgcttgcgatgaggccggtgcaacagtatcaatttcagccgctaaatttaatacaataaaattacgcggttttgtcgaaagtatacgaattaatttccaatcaccaataaccagtaacacatctcccagacgtaatggctcatcaacaattttccccggtaaagcactcccttcacggcgaatagccacaacgtttagcccataacgtgtacggaatttgatttctcttaatgattttcctaataattctgagtcagggttcatagagacttctgctaatcccacatcacgagattgctcagaaaaatactctccacgtaacaccatcggctctaacatttgttcacgacagaactctcgtaaatctacctcacttgctgacatatccactaataggacatctcgctctcttaattcagtgcctcctgtcgcactgaccataacacgccgaaaacgcctccagcgttcaataccgacaacgtttgctccatagcgagagcgtaaatgtaattcatctagagagtgaccaatcagtggtgaacctttacgtatggctaagcgacgtgcacgccctgctaattggtaatcacggataagatcacgaaaagtacgacgataaacctctttttgcttacccccttcacttgaacctaaccaacgacgtaccaccagcatatataacacacccgcaactaatacagcgatccctattggggtaatagagaaaaactgaaaactgggtagcccttccctaactaattcactattaaccaccatattaggcggtgtcgcaactagggtcattaaaccactaattaaccccgcaaagccaagaggcatcattaatcgactgggagaagttttcatccgtgccgccacactgagcaccacaggaataaaaatagccaccacccctgtcgagctcataaaagcccctaaacttgcaacacagatcattaatagcaccagcatttttacttcactactacccgcaactcgtactagccaatctcccatttgatatgccacacctgttcttactaatccttccccaataacaaaaagggccgcaatcagtaatacgttcggatcgctaaatcctaccgtggcttcatttaatgagagtgtgccgctaagaacaaaagcgacgatgacaagtaaagcgaccacatccatgcggattttgttggtcgtaaaaaggacaatagctatcaatagcaggcttaaaacccataataattcgctattcaaaatggcctcgatcagcaataagtgaaaacagattaatacgtcaattcactgcattgataagtagaccatttttaccaatataaatctcgttatatgatcaaataaatgattaacatttatgcttaataacgacttgctgattttctttgtcaatttgtaaatcatttaatgaatcaatgattaaatcaatttcattacgacgaggaagggaaatcggagcatgtacggcaataacctgacacccggcatctaaaccagaataaatacctgcagcagcatcttcaaaaaccacacactcttcgggagccaagcctaatttttttgcccctaaaagataaggctcagggttgggtttcccttgagtgatacattctgccgtcacccaatgtttaggctcaggaatacctgtaactgactgacgagtagaggcaattggtactgtgcctgaggtgacaattgcccaagggatcgctaagtcgtttaagcgattaatgagttcgatagcccccggaagaggggctaatccttctgtttgtgtcgcttctaacttttctagccaacgaaaagtctcttcaatctgtgcttgcgtagcattaggcataaaatggcgaatcgactcaatggccggctttccatggatatagttattaatttcttgtgttgatacccctactcgctcaccaaatagtgcccaacagtattcaacaacaggcaatgaatccactaatgtaccatctaaatcaaaaagaaagcctttacaggtgattgtcatattttatgcctaccttatcgtgatgcgttaataattacgcattcagtatttgttggatctcaacactgcttaggtgatattgacgtggacaggctaaccaaacagccagcattctttggtatttctcccacataggagtttgagagttaaaaccatgactaccactatcaaaatgcgtatatcgcccttcagtattgaccataaagcgtacatagctaagataacgagattctgttgctgcatcaaagcccataaatgccactcgacgagcatccggcatttctggtgattttaaattttctcgagaaacttgcaatgcatggtacatttccatgatgttaataatggttcggcaggtctcttctgacatctcatcaaaatcgcggtctaattcacgtaattgtaatccataaccacgttcaataattgtctgatagcgacgataacgttcagcgttatcaggatccatcatggtcatcattttatattgattagagaggatcaagcgttgtgcgtgtgtcatttccatcattaattctccaaagaaattattggagagagcatggcattaatcaaaacacttgagtagtgctaacaacacgttttttgatctaaacaggggtaattttaatccattaaataacccatgaagaaggtagaacaaatgttctacacatcatcaagaaaagagcgatcaagttgcttaaaagcacgtttaagcaaatgcgctaatgagagataggttggcgtcttttctactggggctaatgcaatacccgcttgctcaaatttttcacgaatttcataaaaccaattgagtaacaccgcgggtaatggcgttgcagcgcgttttcctaaccaccataatccttgcattggcaggctacaggcaaaaagtgcagtagtgatcgccggccccaaatcgccacctaatgcaatttgccaggttaatgtaaaaatagcgataggaggcatataacgtatgccaaaacgcgttgcttttatcattctattttcaggaaaaactggggctaattgcttctcaaccggccaggtttttagatactcgttccctaggcgtaactttttgaagaaacctgggggagtcactgtcggttcgttcataatgacctcaatcaattttttctataacttttaaaaaacatctataaagaataaaaatcttttagtagaattaagtatattttgtctttgttgcctttactctgtatcctgtgctcattctaaaggtttgtggcaataaagcgctatattttgtttgccggcgtgattttcaacccttttcgccgattttcgggcaaaaactttggggtgaataaaaatcgtccaattgatgattggcaactataattagcatcaagttttttaccctaagcatgatgcgtatcattaatgtcatcatagtaatgcgataggcttttatgagtgacgttttattaaccatcgtctttataatataaaagacactacgacaacaagataaataggtaattccatgtcaagtaagctggtgctggtactgaactgcggtagttcttctcttaagtttgcaattattaacccagaaaatggtgaagaattcctttcaggcttggctgagtgcttcaaccttcctgaagcccgcctgaagtggaaaatggatggtcagaaacatgaagcggctttaggcgctggtgctgcccacagcgaagcattaaactttattgttaatactattctggctgaaaaaccagaactttcacaacaaatcgcagcaattggtcatcgtattgttcacggtggcgagaaatttactaaatctgtcgtcattactgacgaagtcatcaaaggtattgaggcggctattccatttgccccattacataacccagctcaccttattggtattgaagaagcgcgtaaagccttccctcatttaattaataaaatggtggcagtatttgacactgcattccaccaaacaatgccagaagaagcttatctgtatgctctgccatacagcttatataaagatcacagcatccgccgttacggtgctcacggaactagccatttctttgtttcccgtgaagcagctaaaatgttaaataaacctgttgatgaactgaacgtaatcacttgccatttaggtaatggtggttctgtttctgctattgttaacggtaaatgtgttgatacttctatgggtttaacaccattagaaggtttagtcatgggtactcgtagtggtgatatcgatcctgctatcgtgttccatttacatgatactttaggtatgagcgttgaagatattaataaactgctcactaaagaatctggtttattaggtttaacggaagttactagtgactgccgttatgttgaagataactacgaaacaaaagctgatgctaaacgtgcaatggacgtttactgccatcgcttagcgaaatacatcggttcttattgtgcactgatggaaggtcgtttagatgccattatcttcactggtggtatcggtgaaaatgcagcaatggttcgtgaattatcactgaaaaaactcgctctattaggttttgaagttgatcatcagcgtaacttagatgcacgtttcggtaaatcaggcaccatcactaccgataacagccgtcttgctgttgttatcccaactaacgaagagttagttatcgctcaggatgctagccgcctgaccgcttaagttttttgatgtactgccagtgttatgctggcagtactgtttcacataacgagcaaccgatatttaaagaggtttccgtgtcccgtacaattatgctagtcccaactgatacacgcgtaggtttaaccagcgtcagcttgggtgtaatccgttctatggaacaaaaaggcgttcgccttagtgtattcaaacctatcgcacagcctcgtgttaaaggcgcattagatcaaaccactgcgattatccgctctcactccacaattcaatccgcagaacctttaaatatggattacgttgagtcattactcagctccaataaaaaagatgttctgatggaagaaattgttgctagatatcacgaaaatactgctgatgcagaagttgtactgatagaaggcttagtgccaatgcgtaagcacccttttgcacaatctttaaactatgagattgccaaaacattaggtgctgaaattgttttcgttactgcattaggcaacaacaccgctgagcagttaaaagagcgcattgaatttgctcgtgctgaatttggtggtgtaaaaaatcaaaatatcacaggtgtgattgttaataaattaaatgcccctgtggatgatcaaggtcgtactcgccctgatttatcagaaatttttgatgactcaagcaaagcgattatctctaatgtcgatttaaataccatcgaaaaaaatagcccacttcctttattgggttgcattccatggaacttcgatttaatcgctactcgtgctacagatatggcaaaacacttaaatgcgactatcatcaataagggtgatattgaaactcgtcgtattaagtctgtgactttctgtgctcgtagtattccacatatgttagagcatttccgcccaggttcattgcttgtcacttctgccgatcgcccagatgttttagtttcagcatgtcttgctgcaatgaatggcgttgaaatcggtgctatcttactcacaggtggttaccaaatcgatgcaccaattaaacaattgtgtgagcgtgcatttgaaactggtctacctatctttatggttaattcaaacacttggcagacttcattaaatctgcaaagctttagcttagaagtgccagcagatgaccatgagcgtatcgaaaaaattcagaactatgttgctcaacatatcaataaccaatggattgattcactgacagcaaactctgaacgtcctaatcgtttatcaccaccagcattccgttatcaattaacggaattagctcgtaaggcgaaaaaacgcatcgtattacctgaaggtgatgaacctcgtaccgttaaagccgcgtctatttgtgctgaacgtggtatcgcaacctgtgtactgttaggtgatcctgaagaaattcgtcgtgttgctgcagcacaaggtgttgaattaggtacaggtattgaactcatcaatcctaaagaagtacgtgaaatttatgtacctcgcttagttgaactgcgtaaaaacaaaggtatgacagaagttgttgctcgtgaacagttagaagataacgttgttctcggtaccttaatgttagaaaaaggcgtcgttgatggtcttgtttctggcgctgttcatacaaccgctaacactattcgcccaccactacagttaattaaaactgcacccggtagctcattagtgtcttctgtgttctttatgctattaccagaacaagtctatgtttatggtgactgcgcaattaacccagatccaaccgcagaacaactggctgaaatcgctattcaatctgcagactcagcaaaagcgtttggtatcgacccacgcgttgcgatgatctcttactctacaggtaactcaggtgctggcagtgacgttgaaaaagtgcgagaagcaactcgtttagcacaagaaaaacgtccagatctgattattgatggtcctttacaatacgatgcggctgtaatggctgacgttgctaaatctaaagcaccaaactcacctgttgcaggtaaagcaactgtgtttatcttccctgatctaaacaccggtaacactacctataaagcagtacaacgttcagcagacttggtttccattggaccaatgttacaaggtatgcgtaaacctgttaacgacctttctcgtggcgcgttagtcgatgatatcgtctacactgttgcattaactgcaattcaagcaagccaacaagaaaatgcctaattattgaattcacttcaataaattataaaaacgccagttcatatcactggcgtttttttataatggttgataaatcaaaaaacacattataaaccccacctataaaacaaaataactcattgatttaataaatctttttagctttattttggcaaaataaacagagacacacggctattttctgttagtatacaggcgggtgcttggatcattttggttcaagcatttgcaaggaccaaaaagacgaaagccccgaattctatttacataaaattcgaggcagtctcaagccatcaacaacttgattctgtctcctttaacaaggagtgtcaagagaaatgactaagcttgcccttattgggctgattactgtatgtattacagttttgtgttttaccctactgagacatgaaagattatgctcttttaatatcagcagtggtaacaccctagttcaagcgaatttatcttgcgataaatagctttgtgggggaattttcccccacaatttctcacccaatgttgttgcgccttgtgttcacaagcaccctactttaaacaatcatatcacttgcgttcaatatatatcacggacgtttttaaatagatcacaaatcaaacaacgcattataaaccccacttataaaacaaaataacccattgatttaataaatctttttagctttattttggcaaaataaacagagacacacggctattttctgttagtatacaggcgggtgcttggatcattttggttcaagcatttgcgaggaccaaaaagacgaaagccccgaattctatttacataaaattcgaggcagtctcaagtcccaaacaacttgattctgtctcctttaacaaggagtgtcaagagaaatgactaagcttgcccttattgggctgattactgtatgtattacagttttgtgttttaccctactgagacatgaaagattgtgctcttttaatatcagtagtggtaacaccctagttcaagcgaatttatcttgcgataaatagctttgtgggggaattttcccccacaatttctcgcccaacgttgttgcgacttgttttcacaagcaccctactttaaacaatcatatcacttgcgttcaatatatatcacggacgtttttaaatagatcataaatcaaacaacgcattataaaccccgcttataaaacaaagtaacctgttgatttaataaatctttttagctttattttggcaaaataaacagagacacacggctattttctgttagtatacaggcgggtgcttggatcattttggttcaagcatttgcaaggaccaaaaagacgaaagccccgaattctatttacataaaattcgaggcagtctcaagtccagacaacttgattctgtctcctttaacaaggagtgtcaagagaaatgactaagcttgcccttattgggctgattactgtatgtattacagttttgtgttttactctactgagacatgaaagattgtgctcttttaatatcagtagtggtaacaccctagttcaagcgaatttatcttgcgataaatagctttgtgggggaattttcccccacaatttctcgccaacgttgttgcgccttgtgttcacaagcaccctactttaagtattcatatcacttacattcaatactagtgttttatattaaaatttctcataaatgcatattaatgtaatggttgttagagacaaacaggtgagctaataaattattgtctattctatttataagatggtaagaaagaataggacgatagcattatgaaaatatcacatttctatcgatggatagtattcatcatactcacaatattggcgctttactttactgtactcggagggtatttagtttcattagcaggatcgcctttttatctctttaccggtgtcatgcttcttattattgcagcttgctttctaagtcgaaagaaaagcaccctattactctttaactttctatttttaataacgattgtctggagtatctgggagtcaggatttgatttttgggcactcgctcctcgcttagatattatttttattctaggcttactccttattcctttcacactcaataataatgtttacacttgtcgtaccaataaaattggcttattcacactattagccacaacacttatcattatattaggtagttcactaaccgatcctcatgccattaatggtcaatttacacaacaacagcccaccaactctatatctcctatcggagtaaatgataatgactggcccgcttatggcagaacgcaagccggaatacgctattcaccattaactcaaatcaacagtgataatgttgataagttagttgagaaatggacttttcataccggtgatgaaaaaagagctaatgatgccgttgagataaccaacgaagttacgcctataaaaattgaagataatctctttctatgtacacctcaccaatatttaattagcttagatcccgcaacaggtaaagagaagtggcgttttgattctaaattgcaatataacaaaagcttccagcatatgacttgccgaggggttgcctattataatcaaaataatagtgccgaatttgccaaaagcctcgacgttcgccaaccaagcatatcagatgaatgtcctgaaaaagtctttcttccagtcaatgatggccgcctaatcgcagttaatgcgcaaacgggtaatgcatgccgtgattttggtcagaatggagaaatcaatctgttagcttctatgccttatgcttatttgggtggatataacccaacatctccccctatcgtcaccggtaatactattattataggtggctctgttactgataacttatcaactcaagagccttctggtgtgatccgtggctatgatgttaatagcggaaaattaatatgggtatttgatactggcgcagaagatcccaatgcgatgccaggtaaagagactcaatttgttcataactctcctaatgcatgggcgcctttagcttatgatgcacaaacggatgtggtctatattccgacaggagtaggtacacccgatatttggggaggcgatcgtcatccattaaaagagcgttacgctaattcagttttagcactaaaagggtcgacaggcgagctattgtggcatttccaaaccacccatcatgatttatgggatatggatgtaccttcgcaaccatcactggttgatatcaaaactgataaaaatgaaacaatacctgccatttatatcgtcacgaaaacagggaatgtgtttgttcttgatagaagagacggtacacctattgttcccgtaacagaaaaacccgttcctaccagtgtcaaatatggtccacaaacacaaggtgagcattactcacccactcagcctttttcagcacttaatttagcacctaaaaataagttgcaaggttcagatatgtggggcggcacaatggcagatcagctgttatgtcgtatcgctttccatcagttaaattatgagggaatttatacaccaccatcagaaaacggtacgcttgtttttcctggtaacctcggtatttttgaatggggcggtatttctgttaatcaagatagacaagtcgcggtaatgaactttattaccttgccttttatctcaaaactttatttaaaagatcctcaagatagtcaagcaattgacgcaggccacggagagcaaggtttacaacccatgacgggaacaccttatagtgttgatattcatccattcttatcaccactaggattaccttgtaaacaacccccttggggacttgttgctggtgttgatttaacaaaaaatgagcttgtttggcaacaacgatttggcaccattagggatagtttgcctaatttagtggaattaccaccattaaaaattggtgttcctgggctaggaggcgctatctcaaccgcaggtaatgtgatgtttgttgctgcttctcaggataattatattcgagcatttaatgtgacgaatggcaaaatgttatgggaagcacgattacccgcaggtggacaagcaacgccaatgacctactctattggaggcaagcaatatgtggtcattatggccggcggacatggttcatttggtactaaaatgggcgataacttagtggcctatgggttacctgataatttatagctttaaattatcaataatatcaggcgattgttattttcaatcgcctttttattatttgctaacactcacaacctagcttaatcaactaatacccgttgattggttgctccccataaaattgacatttcggtaaacaatgcaccactgatatcttcaatttcttctgcggtaatttcgctattaccttgtttgccaaaaaatacaacttcatcacctggtttgatattgttaagactggtaatatcaaccataacggtattcattgatgtttttcctaaaacaggtacgcgttgcccagcaattaatgcatgccccgcattactaaaaacgcgacgataaccatctgcataacctacaggaatattagctagtactgagtcacgttttaatgtgtaagtacgatcatagccaaccgtattacctttaggataataattgattgaagcaatgttggatttaaaggtcatcacacgtttatagtctgtacttgcaatggtatcaccataaaaaatacctcccacacgtaccatatccagccatgactcaggcacggtaattgtcgcaaaggtatttgccatatgtaatgtgacattgttacgctctaatcccatcacctccaacactttctgagattgttgcttaaaacgagccagatcttcccttactttattaacatcttcttcgggataatgagacataataccaaccacttttaggttagctaattgagaaatttgttttgctttttcaagcccagatttattatcgacctctaaaccattacgagacatgccacctgaatttaatgctaaatgaataggaatgactttattttgttgcttggcaatagcatctaatctttttgccatatcaagatcaccaattaactcttctacgttatagttggttgcctgtgccatttcttgttctgtcgcattacgcactcgcattaaacggcctttaaatcctaaatcacgtacttcttttaattcttggttatttgttacaccaatacattgcacattattttctatcataattggggcaactaacgataaatcatgcccataagcatctccttttaacacagcacaaagagaggattgcttacctaataatgattggactttttttacattaaagtcgagtgcgcttcgtgaaatttcaatccatgaattattgacaatagcaggctgagcttgagccacttgagttgctggtggattataatttacaggctgttggcaagcagtaataacgaaaagtggtaataacgcaagatatcgaatagctaaagacatcttctttcttccttagtgattatgatgttaaacctatttttataattaattaggcacaaaaatatacacatagtgaatattcacttaggataatagcattattattcagataataaatataaaaattcatctctgcataaatgccaataagagagaggatttaaatacactatttctaccaaaaaaatgcccgactggttaaaaagtcgggcatttattaaaattccactaataagtaatatcaacgtcggtaatattaacgaacaataatccctaatagaataccaatcacaccgaagtctgcatcactaaatgtggtattggcaataccaatatcaccaagtacaggtaataaaaatacgggtaagaaagtaatcaataaaccttgagcaaaagcacctaaaatagcacctcggcgtccccctgtggcgttaccaaatacgcctgcagttgcccccacaaagaaatgaggtaccaccccaggtataatgacagtccaatctaaagcataaagaataaacatgccaatgacacccgctgcaaaactactcagaaaaccgactaaaacggcattaggtgcataaggaaataccacgggacaatcaagcgcaggttttgcattggggactaacttatcagaaatgcctttaaatgcaggaacaatctctgcaatcaccatacgtacaccttgtaggataatataaacacctgccgcaaaggtgatggattgcattaaggagaacataaaccagtttttaccaccactaacttcacgaacaaaagtgtcaccggcaaataaacacgtaataataaaaattatgcccatggtgaaagcgatcgcaactggcgtatcacgcaaaaagagtaaactcttaggtacattcatctcttccgttgaatgcgctttattgccaaatttactaccaataaaaccagatacaacataggaaatagtagagaaatggcctaatgcgacatcatcagagccggtgatctttttcatataaggatgtgcaatggctgggaaaaataccattgataccccaacaactaatgaacctactgcaactaataccgccccttctaaacccgctgttgccaaaatcaccgcgaccatcatcgacataaataaagtgtggtgacccgttaagaaaatatatttccacggtgttaagcgtgcaattaatatattgattaacatggcaaagaacataatcagtgccatctctttaccaaagcttttttgtgcaatagagacaatggcttcgttattaggtacaacaccttgaatgccaaatgcatgttggaaaatcgttgagaaatcaccaagcgagttaatgactaaacctgcccctgcacctaaaataacaaaacccataatagttttaacggtgcccttaatacattctgtcgcaggttttttctgagcaattaaaccaatcaatgcgattaaacccaccaatatagcaggctctgaaagcacatcgctcattagaaagcggaaaaagtccatactaggctccttatagcgcgcctaattcacgtaatgcggtcgaaagtttctctttcatcgcaactttatcaatcatattatctaaagaaacaattttgccattaaccgcttgagcattaagttgttccgcaatatcacgagttcccacataaatatcactcggtgtcccttttgccgaacctaaatcgacatgatcaacatcagcattgacggccagatcttttaaaatacttttgatgctcatttccatcattaagctacttcctaaaccatttccacatacaacggtaattttcatcatattccccttggttatttaaaattgaattaatagtgattaataacagccaatacttctgccttactttttgcttgcaacaaagtgtctatatcatcttggttatcaaaaagttcagctaatttcacaatggcattaatatggctatcgttatctgttgcggctaaaacaattaaaagtttcaccggatcattttcatcagcaccaaattccacccctttttcgatgatagttaatgctaaagagagctgattaaccccttcttcaggacgtgcatgaggcatagcaatacctggtcctaatacatagtaagggcctatttgctcgtgtgatttataaatcgcatcaacataacgaggctcaatacaacctttgtcaattaatggctgacaggcgattttaattgcttcacgccaatctttgacttgtgggatcacttgtaccacatccggtgttaataatgttttaagcatatttataacctcagtaaggtgcttttttgatctctgtattaaggataataatcactaatggtagcgctatctagatagattatgtgtaattgtgatagcgctattattttgatgaaatgttaattgcgaataagtgcaacaattgacactgtattgtttctgcagagtgggaaaatttcaggtaggatctgcgaattaaaaataaagccgaataaatctgatcacgatgataaaaacacgtaaacgccgaaatacaggtcgcgtcactttacaagaagttgctaaacatgccggagtcggttcaatgaccgtatctcgcgcattgcgtacgcctgaattagtgtcggataaattaagagaaaaagttaaccaagcagtggcagagttgggatatatccctaatgcctcagcaggggccttagcttccgctcaaagccatattattgctgtactactgccctcttttactgataaagccagtgctgattttatgcaatcattgcagcagatcctcagccgtcatcattatcaaatattagtgggatgttatgaatatcagctccataaagcaactgatgtaattaatatgctattacagagtaaccctgccgcattagttgcctttggctcccaattaagtgatgtacagttcttacatatcagtaatgccaatgtgcctgttgtcagtgtcgcgagtcaatctaatgagcaatctgcaataagtattgattgcggttatgaaaaagcggcatttgatttaacccattatttaattcagcaaggtaaacgttgtgtcggctatgttggtgcgctacaaggacaacgtttacaccaccagcaaattactggttggtcgcgtgctttattaaaaaattatttaaatgctgagcaaagtgttactacgcccgaccccgcttctatggcatatggtcgacaagcattaacagagatcttattacgtcagcccgaactagatgccgttatttgtagccatgagagtattgctttgggaatgatgtttgagtgccaacgaagattaattaaaattccccaagatctcgctatcgcctgcttagaaggctctgaaaatagcgcccaaatagcaccttccctgacatctatacattttaattaccataaaataggtaaagaggcaggtaagcacctaattgcactattgcaacatttacgtgatgaggttgataacgctatgtttgaaaataccgttatcaactatgcttatcgtttagaactcggacaaagtaccccttagtcagtggtttcttttgtgtccaagcgagtactattatttcgcgttaaccatagagagagtgctttaagtgaatcaggggtaaattcatcacaacgttcagtgatttctaagggagtaagccagcatacttcctcgatttcttctggctgtaatgcaaatggcccatgtgatacacaactaaataagcttccccaaacgcggcaactctcatcgtcataatagaattgtccatgttcggcaaaaggaaccccggcaatacctagctcttcttctgcttcacgacgtgcactttcgagtgcattttcaccttgttgtactacaccacccgcggttgcatctaaccaacctggatagaaatcttttgtttcagtacggcgttgtgccaaaatttttcccatgccatcgtgcacgacaatataagttgctcggtgacgtaggttttctgctcgcatttgttgacgtgttgcttgtgcaacaacttcatttttttcatcaacaatatcaacccactcgaccactgccgtattttcttgttccatcctcaacaaaccttttttaatcgatgctaaacgatcgtaatttttatcctgaatataccaaaatcaccatatttcaccactataataatcataggtaatttgctttattcatcttgcgattttttgctttttatgatgttactaggcagactgtaaaatatacgctattgaatatcaccttattgcggaggttttatgatcgatctttattatgcaaacaccccgaatggccaaaaaattacgcttttcctcgaagaagtcgccatgccttatactttgcatcatgttgatattggcaaaggtgatcaatttaaacccgaatttttagctatttcacccaataataaaattcctgctattgtcgataatgctcccgctgacggtggtgaaccactctctatttttgaatcaggtgctattcttatctatttagcagaaaaaagtggcaaattacttagccatgatctgcgagaaaaaatgacccaactacagtggctattttggcaagtggggggatttggtcctatgcttggacaaaatcatcactttacgcgttacgcccctgaaaaagtaccttacgcaatcgatcgttatacaaaagagaccgagcgtttatatcaggtgttagagagccgactcgctcaatctccttatcttggtggaaacgattatagcattgctgatatagccacctatacttgggctcgttaccatgacacacatcatattgatctagcagattatcctgcggtagaaaaatggctaaatacaataagccaacgtccagcagccaaaaaactgtttggttagtgactaatctcacctatcaggatgatacaaccttaattaggatagagtaatcaggaggatggtgatgaatatacttatcacaggtggaaccggattaattggcagagcacttatctgccaactcgcattagataaacataatattaccgtactttcccgttcgccacagaaagtctactctcatttctgtaatgaaatggcgtgttggacgcatttagatgataaagaaaacttaaaccaatttgatgcagtgattaatcttgctggagaaccaattgcagacaaacgctggacaccggagcaaaaacaaacgttagttaatagtcgatgcaaattaacccaaaagctggtggatttaataaaagccagcgactctccccctagtgttttaatttctggctctgcggtgggtttttatggtgatcaaggtgaaaataatgtcactgaagagacgccacctaaggatgaatttactcatcaactctgtgccaaatgggaaaatattgcactcgatgcacaaacgccattaacacgggtgtgtttgctacgtactggtattgtactctctacaaaaggaggggcattacctaaaatgagcccgccttttaaattaggtttaggtggaaaattaggtaatggtaagcaatatatgccatggatacatattgatgatatggtcaatgccatcgtatttttacttaataataacaatacccaaggcgcctttaatctgacagcccctcatccagtacaaaataaagcatttaccacgactttagctcacgtactgaaacgccctgcatttatgacggttcctgccacaatattaaaattaatgatgggagaaagtgccacattagttttaggtgggcaacaagcgtttcctaagaaactgctcgatgcaggattcagctttcgttacccacaactggaaggcgctttagaagatattattcgccataaaaaatagtcactcgtcacacaggggatcaacgggcaggtttatccccttgccaacgctgaaaaagatcatccggcaagtcaatgtcaaattgatcaagcactcgatttactgtctgattaacaatgtcatcgatcgttttaggctgaaaataaaatgcaggtactggtggcataatgatggcaccaagctcagcagcttgagtcattaaacgtaagtgccctaaatgtaacggtgtttcgcgtacacatagcactaatttacgtccttcttttaacacgacatcagcggcacgtgtcactaacgtatcagtatagctatgtacaataccggagaggcttttaatcgaacaaggtaaaataaccataccattgacccgaaacgagcctgaagagatagtcgcccctatatctcgatcgtcataaataatatcagctaaagcatgaatatctttgagagaataatccgtttctaatgaaatggtacgacgcgccgcttgactgatcaccaagtgagtttctacggttggcacggatttaagtatttctaataaacgaataccataaattgcgccactggcacctgttagcccgacaatcagctttttcattataatcctcagaatatatatctttgttaatcattatgatgattaaccctcaaaaaacaagcgccgatgtagtgttacgctagcatcgacgcttgataaaggtggctattttaacggaaaattagccttcgttatagatttctaagttctcagcttcatgttgatcacgaattttatgttcatcatcacgacgtaaattttcaaggtaatctaaatagccttgatcaatatcttttgtgatatagacaccatcaaatacagagcattcgaattggttgatatctggattttcttcttgaacagcggcaattaaatcagagagatcttgaaaaataagtccatcagcaccaatcagtttacgtatttcatccacttcacgcccatgagcaattaattcattggcattaggcatatcaataccataaacattagggaaacgcacttctggagcggctgaggcaaaataaacttttttagcccccgcttctctcgctaactcaacaatttgctctgatgttgtgccacgtacgatagagtcatcgataagtaacacgtttttatcgcgaaattctgcacggttggcatttagtttacgacgtactgatttgcgacgctcttgctggccgggcataataaaagtacgtccaacataacgattcttcacaaaaccttgtcgataaggtttatttaagatgtgggcaatttctaatgcaatatcacaagaagtttcaggaatagggatcaccacatctatttgtaaatcttcccactctttagcaattttagcgccgagtttttgccccatacgtagacgggcgttatatacggaaattttatcaataaaagagtctggacgcgcaaaataaacatactcaaatagacaaggcactaattgcggattttcagcacattgacgagtaaacagttgtccttgctctgtgatataaacagcctcaccgggtgctacatcacgcaagaattcaaatcctagtgtatctagagcgacactttcagacgcaaccatatactcactgcgtccatcttctaaagtacgtttgcctaacactaaaggacgaatgccataaggatcacgaaaagctaataagccgtggccgatgatcaaagcaacgcaagcataagcgccacgtaattttttatgcatagccgcaacagcggtaaaaatattatctggctctagcggaaaatgatcgaagcgatctaattcatacgctagcacattgagtaaaatttcggagtctgaggtggtattgatatgtcgacgagcagtttcaaataattgacgacgcaacaaatgcgcattggttaaattaccattatgtgcaagtgtgatcccaaaaggtgagttaacataaaaaggttgcgcttctgatgcactcgaactgcccgcggttggataacgtacatgtcctattccgatagttccttttaaacgcaacatatgacgcgtttcaaagacatctttcaccagcccatttgctttgcgtagacgaaaaccgttattctcatcaattgttgcaatgcctgctgcatcttgacctcggtgttgtaacaccgttaacgcatcataaatcgattggtttactggattaactccagcgataccgacaataccgcacatgaaaagatcctcatcagccagacggagaggttacattttctccgacacgaaacttgacgcattttgtaggtagtcaaagaaccacctaataatatggttgaattgaggaataagctcagaacgttgccaatcggcactgtctgccataggagtaaaagcacccaagacaaaaagtaacgctgatacaatcagcacacctcttaaagccccgaaacagatccccaacacacgatctgtacctgataaccctgtgcgttgaacaagagagctaatcacataattaatcaccgcaccgacaattagcgttgcaataaacagtgtgacaatcgcaatcccgttacgaaccagctcatcttcaaaccgagtaaaatagacggctagataaggataaaactgacttgcaacaaaaaaaccacaaccccaggtgataagtgataatgcttcacgaacaaagccacggatcaggctaactaatgcagaaaaaccgataatggcaataatggcgtaatctatccagaccataaatctctatccaataacgatgccccgcattaatacggtagcattctaacagaaaacgaaaacgtttgcgtaacgctaattttcgataattttaaaataatttacggcgacatgaaaaatcataatcgccgcaataagttaacaccttgttacttcactcatctgatgtctcatcaacatagttatggtttataggctcttacttcaccttgcaggcctgttagctctttaaggcgaggtaacatcgcctgtaactctgcttttgaggcattaggcccaatatagatacgtgtcacttttcctgaaacagggcgagcaggcacggtatatactggataaccggagaggtgcatttttgcaataatttcttcaactttcgccgcatttttcaaggcacctaactgcacaacccaagcctcacctttcggcgcggttgtttctgataccgccggtggcggagtagttggtggctctacaggcggattaaccactttaggtggctcaacaaccggggttgatggcgctacttgaggctccgatacttcaggagtagaaacttgaggctgttcaacccccgttaccgcttcagagatcatcgcctcagaagcaccctctgatggcgttgacggtgtcgtggtttgctcaatcggcgctattgattcaatatcttgctcatcaccgggtttggggactaaaggaatagaggcaaattggtcttcgttatatttcttatcgccgtcaaataatgtaggaagaaaaataacccctaccgccacaagaacaacggctccgactaagcgattttgaaatttacttgccactcgcactctccttttccaatagttccattacatgagcaacggtatggaatgatccacatacaaccacaatatcatttttttgcgcctcagatattgcttgttgccatgcttgctcgacactatcaaatactgccggatagtcgaggtgctgagctaatacctgagctgatgcgccacgaaactcattcaatggtgcaacataccactgatcggcttgaggggataaacacgctaatgtacccgcaatatctttatcacccagcataccaacaacaatgcgcactttggtatcagaataacgcggtaattgcgccagtttttcggctaaatatccagcagcatgcggattatgagcaacatcaaaaataactaatggatgctgcgaaattatctgaaaacgtcccggcaactgagctttactcattccctcaacaatactttgatgggtgatcccttggctcactttatcgtcgcttttcaataagcagcgtattactgccattgccgtacctgcgttggctaagggaatattagggatgggaagtttttcaaactgcttatctgcactacgccaatgccagtgatcaccatcaatagaaaatgaccaatcaacaccacgacgaaataatttagcctgtttctgttgcgcgacttgtgcaatagacagtggcatatctggctcgcctacaacagcatagtgatttttacggaagataccggctttttcatgaccaatatgctctctatcagcccctaaccaatcggtatgatcaagggcaatactggtgatagctgcaatatcggcatcaacaatattggtcgcgtctaaacgcccccctaacccaacttcaagaataaccacatcaagctgagcttgttgaaatagtttcaatgcggcgagtgtgccgtattcaaaaaaagtcagcgaaatatcgcctctggtttgctctatttcagcaaatacttgacaaaactcagctggtgaaagctctttaccttgaatgcgaacacgctcggtataacggacaagatgaggtgaactataaacccccactttcaatcctgaagccatcaaaattgactcgagcatatggcaagtggttcctttaccattagtacccgatacagtgataactttaggggcaggacgtaatacattcagtaattgacctaccttgcccacgcgctcaagtcccatatcaatagcacttgagtgtaagtgttcaagataagaaagccacaccgacaaaggcgatgtggcttgaggagcagttatgatattagacatcttcttttttattcgtttcgatgttaatttctggctcattgtcagaagattcgatgtcatcagcgatcatttcttcgcctagcagttcatcttcgtctttcgctaaatcatactgagtcagcttagccagtaattcagctagctcatcacgcatttcaggacggcgaactatcatatctatcgcccctttttctagcaggaattcactacgttggaaacccgcgggtaatttctcacgtacagtttgttcaataacacgtggaccggcaaaaccaatcaaggctttcggctcagcaacattaatatcgcctaacattgctaaacttgcagaaaccccacccatagtaggatcggtcatcactgagatataaggtaaaccacgctcttgcattttagctaatgcggcactggtttttgccatttgcattaatgacatcaatgcttcttgcatacgtgcaccaccacttgcagagaagcaaatcagtggacaattatcttctaatgcttgttcaaccgcacgaacaaaacgcgcacccacaaccgacgccatagagccgcccataaatgcaaattcaaaagatgcggccacaacaggcatttcttttaacgtacctttcatcaccactagggcatctttttcatgggtttgtttctgagccgcagcaattctgtctttatattttttagagtcgcggaatttcagaatatctttaggctctaactcactgcccagctcagtcgtgcttcctgtatcaagaaaagtttctaagcgacggcgtgctgaaatacgcatgtgatgatcacatttggggcacacttctaaattacgctctaattctgcgcggtaaagtacttgcccacagctatcacattttgtccaaaccccttctgggatattggctttacgtgaactcgtgatattgcttttattaagaattttttcaatccagctcattaacggaccttttcgtctgaatctgaccttcgccagtttatactcgtcatattttaagttgcagcatgttgactgcgtttaattgcacaagtcacctactttgtcggtgtgcttttcgtgctgcattcacttatcgcctagctacaaccctaattatttagagcagattattgtgaacatgttaactcacaatatactggctatgtggttagcaaagtttatgatgataccgcttactgaatttcagcgcatctctttattattgctattctacggcaaaagctaatgataactgctcaaacctcttggttatcactctcttttttggcctttgcactcgctctacgatggcgtatcacttcgataacacctggtaaaatagaaataacaataatggcaacaattagcaattttaagttcttttgaacaatatctaagtcaccaaaaaagtatccagcataagtaaatagcagtacccatgcaatggcacccgtaacattataaaaagcaaaatgacgatatgacattttgcccattcctgcaacgaatggcgcgaaagttcggacaatcggcacaaatcttgccaaaattatcgctttaccaccatgtttttcatagaaagcatgggttttatctaagtattctcgtttaaagatacgtgaattgggattactaaagagtttttcaccaaaaatgcgcccaatagaatagttaaccgcatcacctaaaatcgcagcgaaaagcagtaagagaaccattaggtgaacattaacatcattggtatctaacgcagataaagcccccgcaacaaacagtaacgaatcgcccggtaagaatggtgtgacaacaagccccgtttcacaaaaaataattaaaaatagaatggcatatacccatgtaccatattgagcgactaactcggctaaatggacatcaatgtgtaaaataaaatcaattagaaattttattaaatcagcaaattgcgttaataattccataaatcctcagaaaacggggtaattttatgtttaaagtatttaaaatgggttatctgctaaaaatagcggccccattgcaggtttaggaagttcgaaacgttcagggtaatcaaccgaaacaagatataaaccatttgcttttgcagttgctgctgctttagtcctatcttttaaggctaataattcagccatccaagtaatagcctgattaccacagccaatttccaatagactccccacaatatttcttaccatatgatggacaaaagcattggcttttatatctaccaccacataatcaccatagcgtgaaacattcacatgcatcacattacgccaaggtgttctagattggcattgtacggctctaaacgaggtaaaatcattctcgcccaataaacattgggcagcttgatgcattcgttgtgcatctagagggtaatggaaatgcgttacccctgaggataaaattgcaggacgatagcgatgattaaaaatcacataacgataacgtcttgcggttgcgctaaatcgagcatgaaaatcattcgctaccgtttttacccaacgaacggcaatatcttgaggtaaatgggtattaacccccatcgtccatgccgcatctttgcgatgagccgttgtctcaaagtgcacaacctgcccggttgcatgaactccggcatcagttctgccggcacaaaaaacagagataggctcatttgctacttgagataacgctttttctaacctttcttggacactacgaacctcattttgacgttgccagccataatagtggctaccgtcatattcaatgcctagcgctatctttaatggtgtactttctgccacaatcgcaggctcactgattgactgcgctatcacatcagcactctcttggtcgttcatcagtaaaactgctcctgcactaatttttcagccacttctacagccattaatgctccgccaaaacgcacgttatctgcaacagaccaaaattgtaacgcttcaggcacaccataatcattacgtaagcaacctaagttcaagctaacattaccggaggcatcggtgacttgagttggaaaatcattttcatcactaatattgagggagtcatgttcttgtaatgtttcccgtgcttcttcacttcccattggacgtgatgtttccaactgcacagattgtgcatgaccatagaaaacaggcgcttgtaatgtggttactgagataggtagtccatcgtcttgcaagattttacggatctgatcaaccatttggcgctcttcttgaatagagccttcattatcaactaacaatggtaaaatattaaatgccagttgtttattaaagcgaccaagttctggaggaacaccgttcagtaagcgcgcactttgccccgctaattcatcaacagcttgtttaccaaaacgagatactgacatcaaatttgtcacattcaagcgagttaagcctgcggcttcggttaatggatagatagcgcgtaacagttggcttaccatgctatcagcaatagcgataatattgcggttacgatactctgccagcatagatgtattcacccctggtacaactaaaggtacatcccactccatcgcaaataaaccactgcaatcaataacaatacaacctgaatctgctgcaagttgtgcgtattgcgcactaatctcaaccggcgcggcaaaaaaagcgagttgaatatccgcccattcgatattatgaataccttgtactgcaacacttttaccctttacacggatagttttgccaatactgtcttcactggcgatcgccgttaattcgccaataggaaaatcacgctcttgcagaagctctaaaatagcttcacccacagcacctgttgcgcccacaagcgcaatattccaaccctctcccataaaatatcctccaatacagtaaaatgtttaaataatgtcacgtcttatttatgtgttgcattaaacccaatagcattgagtaagctcgccgttgtcgggttatcacataccacctgtaatgaagaccattcacgacggacagggtaaaacttacgtagcttatcaaactcccctttgataccggcaactttgcgcaatggtgcatcatcacgacgtacatcatagacaagatgaataagctgtttgagtaatgtttgagttaattcaccttgtacagaaattgtggagatcaacggttttggtaacagtgttgataattcaacgtgttgaggttgaccaataaaatcacaataagcctcataaacctgcgttgttcctctcgccttcccttctaaggtatagccagcaatatgtggtgttgcgatatcaactttatttaataactcaagagaaagatcgggttctggctcccaaacatctagaacaacgcgtaactttttaccttggtttaaggctgataataatgcagcattatcaataacctcgccacggcttgcattaattaaaatacgaccttcaggtaaaatatcgaggttgctctcattaattaaatggtaactgttataacgacccgatttatttagcggtgtatggaaagtcaggatatctgcctgctttaatagcgtttctaaagaatgaaattgttcatcatcccctctgtcagctctaggcggatcacaaagtagtacattcacacctaatgcgcgtaagcgttttgccagtctccctccaacattgccaacgccaacaatgccaacggttttatctgttaattgaaatccttcttgctcagcaaacaccatcaacgcagagaagacatattcaacaacagcgatcgcattacaacctggcgcagatgaaaacgctattttttgttgctctagccatgctgtatcaacatgatcaaaacctgccgttgcggtgccgacaaattttaccggtttgcccgctaatagtgatgcattgactttagtaatcgatctcaccatcaatgcatcagtatcatcaagctcttcaataggtaaagggcgacccggtacagcttttacttcgcctaattggcaaaaaagctgctgcgcataaggcatgttttcatcaaccagaattttcacggtgttatctcactgatttgttttttatgtgtgtaaacaaaggatcaaaaataaaattaagcggtctattttgccacttattccaagtaaagcctattattgacgataaaaactgacgctattttaagtaaatatatgaaaagaaaccttaaccattgggtaagcgacgaaatctttctggtgttgttccagcaaattgctgaaacatggcaataaatgaggatgatgagctatatccaacatcaaaggccacatcattaacactttttccttgttctaacaaagagatagcatgtaaaaaacgtaatcgcttacgccattcactaaaagacatgcctaactcttgctgacaacgacgtgataaggttctttctgaggtataacgtttttttgcccataattctaatgaggtattatcagcaggattttgctctaatgctgccaaaacgggtgctaacagcttatcttttgaggaaggtaaataggtatggtgaataggagatacttttagttggtctattaacacttgagataaacgtagatcttcttttgtttgcggtttacaaacgccacgacggaagaaatcggcaaaaatcgtcgaaaaaataggacttagttgaataagacagggtttatccaataaaccttcacaccaactgggtgcaatatctagcaccttaaaagataaggtttttttattgtaacttgcgtgccctactttttcagggatccatacactaaattcaggtggcgctaaaaaacgttgcccgccagcttctaaatccattactccagagatcacataaagcaattgaccaaactcatgttgatgataacgaaattcagtttctgcaagcaattgctcatcacgaaaacggaccgtatctggatcagagagtaaccactgcatctctttttgttgttcaattgtcatcttaatgttgctcttttatcgttttgtctttattggcctatcggttgtctgcttttcattatatatatctaatcagacaggcttacaatagccatctggtttaaaaatagatgtgagaataatgaaaagtgtaatcttcccgctgttagcggtacttatttggtcaattaatgcggttgtcaataaagcggcaacatctgtgatagatccagccgctatctcattttatcgctggttcttagcatttttactgatgacgccgtttctgttagtccctgtttggcatcatcgtaaaaccgtaaaacaatattggtggaaattatttattctcggcgcattaggtatggggttatatcaaagtttagcttactatgcggcttattatgtgacagcaacctttatgggaatattgaattcacttattccattattaaccgttattattagtatttttgtactgcgtgtcgtgcctactgtagggattgcactcggaactattttatctattagtgggcttgtctggttagtcagccacggtgatccttcacaactcctttctcaaggtttaggacgtggtgaattaatgatgtttatcgcatcaactgcctatgcattttacggagtacttaccaaacgttggtcaattcctttacctaattggcagtctctatatgtacaaataggttttggtgttttattactaatacctaattttcttaccgcagaaagtattgcattaacaaaagataatgttggattagttatttttgcaggggttggcgcctctattttagcgccttatctgtggatcttaggtgtaatgaaattaggtgcaaatacaacctctatctttatgaatttaattcctctatttaccgcaatgatcgctgtagcagtgttaggtgaagagatgcacagttatcattttattggcggaggcgttatattgttagggatattcttagtacaaaaactaagagcaccactgaatttccgtcgtcaatctgtcacaaaaaaagcagattgtcagcaggagatgtgagtcaatgtcagctagactataaataaaaaaataccggctaagcaattagccggtcactttgctcccctagtttttataaataaaaaccaaggcaagaaaatcaaagtataaaatataaagtaatacaagtatccgttgcaaacattaccaacttttatattaaatatctcctgcttatttaatataaaataatccagatcaatttttcccctcacctttttaatgctatcgatattttcattaagttaactatttataaaataaaggatttaatctataaaattagtttttaattaaatgattgatttaaaatcatagtgaaaacaactaattttaaacaattagatagttattttatctattggatctgtatgataaaaaaatgacaatcaataagattatgctttaataatatttacagcatttttttaacatagttttctataaaaccaaaaggatctttatttattttgcagaacaaatttatttatacaaaaaataaaaaagcagtcacttattataagcaactgcctttatcatttatacaaggaaatctaagtataactaactatttcttatacttactcatcacaagtgaagcattagtgccaccgaaaccaaagctatttgacatcactgtatctagtttttgctctgttggtttggtaatgatattcataccatccgctttatcatcaagctcttcaatattaatacttggtgcgataaaaccatgctctaacatcagtagactgtaaatggcttcatgaacacctgcagcccctaatgagtgacctgtcattgccttagttgcagaaatagccggtgttttagttccaaaaacttcagcaatcgcttcaagctcttttaaatcacccacaggcgtcgatgtaccatgagtattgatataatcaacatgatcaataccttgcattgccatttgcatacaacgtacggcaccttctcccgatggagcaaccatgtcagcaccatcagatgttgcaccatagccgacaatttcagcgtagatatgcgcaccacgtgctaatgcgtgctctaattcttcaacaaccacaataccgccaccaccagcgataacgaaaccatcacggtttttatcataggtacgagaagctttggctggtgtatcattatattttgttgaaagtgcccccatagcatcaaactcacaggtcatctcccaacttagctcttcaccaccaccggcgaaaaccacatcttgtttacctaattgaattaattcaaccgcatgaccaatacagtgtgctgatgttgagcaagctgaactaattgaatagttaacacctttaattttaaacggtgtagctaaacaagctgatacaccagacgccattgcacgagttaccatataaggacctacaccgcgtagacctttagctctcatgccgtccgaaccttgtacttggttacgaggagaaccaccaccggagccgacaactaaaccagaacgaatgttagaaacttgatcttctgttagacctgaatcttcaatcgcttgttgcatagataaataggcataaaccgatgcatcactcataaaacggcggattttacggtcaataagaccttcagtatcaagcttaacattaccccaaatgtggctacgtagccccatctctttaaattcttctgagaaagttatcccggaacggccttcttttaaagagtccagcacttcttgctggttattaccaatgctcgaaacaatacccagacccgtgatcactgcgcgcttcatttatacctctttacaataatagttgtagctgcgggatttctgaatagcactttagcgtacacttgtacgctgaacaagtccgatcaggatcttttttacaaaaatgcagataatatgaaaaatctctgcgtactcaaaaggtggaagatgcttaagaacagcgttaagatagcccattatttttggtaaaatacaggtagttccgtgaataacactgctataaataccgcctctttaagttggaatgaacttggtactccgatttcaaaacagtttgatgatatctatttttccaaccaagatggtcttgaagaaactcgacatgtattcctacatggaaatcattttccatctcgttttggtacacatgtacgctctgagtgtgttatagcagaaaccggatttggcacaggattaaactttttaacactgtggcaagccttcgagcaatttcgtcatcactcacctgatgcgccattaaagcgtttacattatgtcagttttgaaaaatttcctctgactaaagctgatttgcaaacagcccatagccattggccagaactagcacaatattcaacagcgctttgtgcacagtggcctttacctattgccggttgtcatcgtcttattcttgctaatggcgcgataacgcttgatttatggttcggtgatatcaatacattactgccacaaactcgccaagctttacataataaagttgatgcgtggtttcttgacggctttgcaccaagtaaaaacccacaaatgtggagtgaaacattatttcaagcaatggcagactcgatgcgtgaaaatggcacttttgccacctttaccgcagctgggatagtaaaacgaggattgcaacatgttggttttgaaataaagaaaataaaaggctttggtcaaaaaagagaaatgttaacaggggtatttccccatcctcctgccaatgcatttgttccctactatgccagaccttgtgctacacaaagaaaagatatcgctattatcggtggggggatcgccagtacattaactgcactcgcctgcttaaaaagaggcgccaaagtcacgctctattgtgaagatacacatcctgcggcaaatgcctcaggcaatcggcaaggtgtgttatacccattacttaatggcaaatctgatgagttagaacactttttcactagcgcttttttatatgcccgccgttattatgatgagttaaaccataaaggcgtaaacttttcacatcaatggtctggtgttgcccaagttatctataatgaaaaagtacgcaaaaaaatagcgcgaataatcgagcattccacacctttttctcaacttgctcattatgttcatcaagatgaaatgaattcactttgtggattagccatcaaccaagatggtcttttttatcctcaagcaggttggctttctcccacagagttaaccaccaatgcattaaaatacgcacaacaacaaggtctcaagctactctttgaacatcaagtcactcaattaacctcacaacaacagcattggctgttagaggtgactcaccaagcaacaacgtataaaacacaacatgattgcgttattttagctaatgggcaccgtattactgattttatacaaagtgaaaaactgcctatcagtgcagtaaggggtcaagttagccatatttcaacgacacctgatatcgcacaattaaaagcggtgctctgctatgatggctattttacgccggttgatcctcaagataatctgcattgtgttggggcaagctttcgtcgtgatcgactagatttaaatgtttcaattgaagagcaacaaaataatcaatggcacctcacgcactgtttagcacaatcaccttgggcacagcaggtagattttagtgataacgatgcacgtgtcgggatccgctgtacaataagagatcaccttcctttattaggtgaagtacccgattttgaaaaattagttgtcgcctatacgcatttagatcgatttaagcgtagaaagcaaacacctattttggcaccgagttatcatcagctttatattattagtgcattaggttcacgtggtttatgctctgcacctttatctgcggagatcttagcaagccaaatctttgatgagccatttcctgtagaagatagtgtgttaaatgccttacatccaaatcgtttctgggtaagaccattactacgcggaaaagctattgaattaaaatcataggatcagtcactgaaattacggttgatatttaagtaactattgttaatgggttacttaaatatctttatagtatttaaattatagtatttaaatttcacacttcatcgcacaacgcatttctctcgcaaatcccccatgctctacttcattatctaaaatttgttgtaaagaatagggtatttgatgctcaagtaagatatggaaacctaaacgctgataatagggggcattccaagggacatcgcggaaagtcgttaacgttatcgcattaaattgctgtaatttagcttcattttttacagtctggatcagcaatttaccaatccctttattttgccaatctttacttaccgataattcatgaataaatacactttcaggtaattgttgcgtcatgataaaaccaacgggatgattgtcatgattaacagcaacccagtgagcatgttgatggataaattgaatatgcgcctcaacactttgtacaccactttcgctgatccaacttaattcttttatgctgctaaataactctcctgccgattgttcaatcttcggtagttggttggcatcagccaattgagttggccgaatagtgatctcgtgagtagcgattttatttgatgcgttggtcataaataatctcttttataacttgctatttgcttattaagagtatcaattacctataaaaaaaccatccataaggatggctttttatccgttctaccaaaaatttaatctctaggtaagatcccataagattgatattggctcgcttggtgaataaaagaattatagtatttattatcttcaacagagttttttactgctctttcactatcggcttttgataacttatttattgcttcatgtaatggtgttttaagctgtttatggatattaggatcattactttctttaatttgatcaagcaatgcaacccaattttctgcctctgcttgaatatcaggatcagtaaattgtggttgaggtaaactgtagtctaacgctagattaacagtatcgttatactcatcttgaggggaaagcggttttagatcttgaccataatcagtcataatatattggattaattcaggtttatcaaaacatttggttttgatgttccccatttcgtttttattatggcttttaatttcactggggaaaggttcacctaacgtataagtacatttaaatacattgccatcaatcaaggtagcattcgtgctttgtaatggcatttctaactgatagccattaataaccactttatattctgttggtttaaagcgatctcccttaccttgtacagcatagacttcagataaacggtaatacataaaattatcaggatttaaaattccaccattgttgttttcatacaccataaaagtggatttattacctgcactatcttgtaaactatgttcgcccggtgagagtgttaaataaccacttttacccggctcaacctgatatgttttatcatcaacaacaaagctcatgcttttttcactgggattactgtaataaaacttatcttttttattatctaaatcaagttgatcacaggcagataaaaccaataccgtgctagcaataaggcttattttaaagaaatttttcatcgtattgttatccttatcataaatattttatgcaaatcatttgcatcccgagaaacattcctaaaaaacatttaaaagtaatttggcagaaatggcaaggagtaacaaaagatagcactattatgctttaatcaatgaaagagacatcgactttgaaaaatcaaataaaaacaattgataaatagtaaggagaatttttgtataaaatcctttctttttcaagctcaactgtcttaaacaaggttttcgatgtggttaatcgttagcaatcaaagaaaaacaaccgatagtatcggttgttctcaatataggttatttatactaattaatcgagttaactaaatcatgccacgtcgataaaaccaatatttgatcaggaggagaaagctctcctgctttgatagctttttgaatgctctcttctacacgggattttaatgctgataattgcgtattgttttcttgctcaagctccgcaatcgctaaagtgatgtggccttgtaaatatccaccagcaaataattcatcatccgtagcatgttcaacacggctatcaattttatctaataagtacgtttcatactcagaaagcattatttatcctcaatatataatgttgctatcagatttaagtcactcgatgtttcaatagcaaccttattacctcaggctttattggtttactaaaacctgcgcagtggatagacgaggatagtttatctcgtcatccttaattaacgaggggattttcctgataaggaaattgctccggcgttaactcaggtgtattgtaaaacaaatgtaacgcattaataaatagctgtgcacgtggcgggatatttttatcgcgcaaataagctaatacttgctctctcaccttgtttctaaactggtaacggtctggctcaaaatccccgtctaaattatcgcaactcacgttaaatggataattggctgcttggcagaataaccagtcaagagcttgaggcttgatttcaactcgttcaaactgctcttgagtcacttgatctcgcccatcaggacaataccaataaccataatcaacctgctgacgacgcgcgtccccagcaatacaccaatgcgatatttcatgtaatgcactcgcgtaaaatccatgtgcgaaaatgatttggtgataaggtatctcttcactcttaggcaaataaattggctcgttatcacctttaactaaacgtgtttggtaactatcgctaaaacattgattaaaaatatcaattaactgctgataatgatgtgctgacatttaaaaattatctttcctaattaaaaagtgcagaaaaccaaagtgcaatagtatcaccatgattgtcatgaatgagtttgatgctcatcaaaaaggagataatgaccagcattggtctaattaatttttgtcctttggttaacaccaaccctgcacctaagcgagcaccaataaactgcccgcataacataactaaacctatggtccaaattacctgtccaccaagaataaaaaatagcaaagagccaaaattagaggtgaaattgagtaatttagcatgtgccgtcgcctttgagagattataaccaagtaacatgacataacctaaagcgaaaaaagatcctgttccaggaccaaaaacaccatcataaaagccaataccaccgccaataataaccccgaaagtataatagccaagacgttgcttactatccttagccccgatagatggtgttaataaaaaatagagaccaattgcgatagtaagaacaggcagcgcttgttttagtaattcaggattaataaattgtactaacatcgcaccagaaacagcaccaataaaagtcataaaaatggcaaagcgctgtgcttttaaatcaatgacgcgacgacgaataaaatagagtgtggctgaaaaagaaccgcccactgattgaagcttatttgttgccaacgcttgtacgggtgatattcccgcagagagcaaggcaggaatagtgatcaagccaccaccgccagcaatagagtcaataaagcctgctaatacagcaacaaaaaagagtagaaggtagatgccatctgaaaatagccaatccatttatctatccgaattatcagaaatgagggggcgtgtgttactgatttatttgattattttaaataaaaacagtaacactatctgagcatagaataataaggcgctcacacctttaaaaactcatagcaaacttactacagattatgcgctgtattattgatgtaagctaagatcaccattgcattaatggaggaataacatcaccacattgaccccgttgacgtaacgcatgatcaagtaacacaatagccatcatagcttctgcaataggaacagctcggataccgacacacggatcatgtcgccctttggtgatcatatcgacttcttcaccttgtcgattaagtgtcttaccagcaatagtaatacttgaagttggctttaaagcaatgtgtgcaataataggttgaccactactaatgccacctaatacgccccccgcgtgattactgctaaaaccttctttggtaatttcatcgcggttttcagtcccttttaaggtcaccacatcaaaaccatctccgatttcaacgccttttactgcgttgatgctcattaacgcatgagccaaatcggcatcaagtctatcaaaaacgggttcgcctaatcctgcaggtacaccttctgcaaccacggtaactttggcacctatagaattaccctctttttttagcgctcgcatatattcatcaagggcatctaggcgagaaggatctgggcaaaagaatgggttggtttctacaattgaccaatcaactaactcacaactaatcggccctaattgagataagtaaccttttacttcaataccaaatttttgtttaaggtattttttggcaatagcacccgctgcgacacgcatggcggtttctcgagcagaagagcgtcccccgccacgataatcacgtaaaccatatttctgttcataggtgtagtctgcatgccctgggcggaatacatctttaatttcgctataatcttgagagcgctgatccgtattttctattaataatccaatactggttcccgttgttacaccattaaaaacacccgataaaatacgcacttgatcaggctctctacgttgtgtggtataacgtgaagttcccggtttacgtctatctaaatcaacttgtagatccgcttgcgttaaaggtaatccgggaggaacaccatccacaatgcaacctaacgctgtgccatgagactcaccaaaagtggttactctaaataattgcccgatactgtttcccgccatccctcaattcctatcttatgactgactgtgtgatgttattaatatgttatttgcaaccataacaatctaccgtttcatcacattgacatcaacgtttatcgctagcaaagctatctgaaaattcgacaagttgctcacgcgttaacataaagacaccaatgcctcccttttcaaactcaagccaagtaaaaggaacttcaggaaattgttcgataagatgcaccatgctattaccgacttcacagacaagaatgcctttttcgcttaaataatcaggtgcttttagcaaaatttgtctggtgatatctaagccatccacaccagaagccaatgcaagttcgggttcaatatggtattcatcaggcaagtcacccatatcttcagcatcaacgtaaggtggattcgtcacgataatatcgtatggtgtaggaacaattgcctcaaagagatcagattgcattggataaacacgatgaattaaaccatgattttcaatattaaactcggcaacttctaacgcatcagctgaaatatcgactgcatcgacttctgcttcttgaaattcatgggcgcaagcaatagcaatacatccactgccagtacataaatcaaggatacgggttggctcttgcccaatcagtccagcaaaatggttattaatcaattcaccaatgggagaacgagggatcaaaacacgttcatcaacataaaattcatgtccacaaaaccacgctcgatgcgttaaataaggcacaggaattttttgttcaatacgaacctcaataagttgaatgatttccattttttcagaggttgtaagtttggttgataaaagagcatcaggaatatctaaaggaagagccagtgtaggtagaacaagctgtaacgcttcatcccatgcgttatccgtaccatgaccataataaatatctgatgaattaaactgactcatagcccaacgtaacatatctaagatcgtgcttaaatcagctacggcttcttcttttgctgtgatatccaaaactgttgtcctctgacggatctgacgaaatagaaagtctgtagtttgccatgaagatcgtgataaatcagcgttagataataaaaaaagacaatattattaaattcatctcgttttatctttatgacgaaacaaatttaatattagccagataaaccaaataaatcacacaaaaaccatacaatcaactaacaacagataaaaaaccagaacaaataattatatttatcactttaactagtaattataagaaatcgatccatacttatttacatgtgatttattattgaactgaacagtcagtaatatcaataacatcttgttctgcaattggttgttctgtttacgatgttgttctctcaataatactttttcgatttattaggagatgaaaatgagcagtaaaaaactaacccctgctgaagttaatgatgcacataaactccaaacccgtcctctatctacccctacagatttagcacctaaagcaacaaaagaagttagtgcagcgatgaatgctattcttgcggatgtgtttgctttatatctaaaaacaaagaacttccactggcatgtgagcggtcctcattttcgtgactatcatctaatgttagatgaacaaggtgatcagctctttgccatgacagatcctattgccgagcgtgtacgtaaaattggtggcatgacattacgctctataggccagatctcaaaaatgcaacgtattaaagataatgatgctgaatttgttgaacctttagatatgttagctgagctatgtcaagataatcaattacttgcagcagaactgagaaaagcacatgttgtctgtgatgaaaataacgatatttctaccgcaagcttaattgaaaattggatcgatgaaacagagcgtcgtacttggttcttatttgaagcttgtcgacgtgcagaaacatcagggcactaattaatctatttgctagctatgtgactattttggcagggatcccccctgccttttttgtttcatctatttaacaatagttttttatctccccttatatttaaggtactattatttatagatatagatgatagcaatgatgaagaacgctaaaaatgaacaaaaaattcatattacctccttcagaaatagaattatttcaggagatgataaaaggcaccaaaaagctcccacaagataaaatacgccaccaaacaccgcgaaaaaaagtgactcattatccaacagagcgattacagcaagagcaaatagatgcttcttactatttctccgatgagtttcaacccaacttggcaacagaaggcccgatgcgttatttaagagaaggggcaaatgcgtacgagctaaaaaaattgcgtcgtggtgattatgtaccagagttttttttagatttacatggattaacacaattaatcgccaaacaagaaattggtgccttaatcgcggcctgtagaagagagcatgtgtattgtgcctgtattatgcatgggcatggtaaacatattttaaaacagcaaacccctctttggttagctcaacaccctgatattattgcttttcatcaagcaccaaaagagtggggaggtgatgctgcactattgctgttagtcgaaaatgatgatattgcgcgtcgttaacatcaccgaataaatccgaacaatataaataacatatagactttattcggtaatttgttttaagtttgctggggagacttgccacagcaatttccccgagcctattgataaatcaaaatcaacacaagcaatcgttgaggttgaaaacatcggtgcactcactgttggacaaagctctgccacgacataccctactaaaggtagatgtgatataactagaatattgtgataccccacttcccctaatgcccttaaataatgagcaatatgatcaggattgcccccaggaataagcccttcatcggtttctatcttagcgggtaatactaagccttgttgcacaacattcagtgtttgttgtgcccgcaaataaggactaactaaaacataatcgatactatgatcttgctgtgtcatccaattcgccatggttaatgattcatattcaccacgctctgttaaagatcgtagtgcatcactgggcgcatcaaaagtagcctcaccgtggcgcataataaaaatttgcataatcaatataaacctattttgttgttatcatttctaagggtatcaatacataaagcaagtaagaataacaaatatctagtcttaaccaaaagccccaaacaaataatacgctattttatccagtaaatttgctctatttggtatattttaacaccaaaaaattatatttaatctcttattaaaacaaactgtctttagaatataccattggcgtttattgtcccccaaaaacacttttcactcagctatcattaacatttataagccgatttttgattaataataacaccttgtttaatcagcgcttaatttagcgaaaaacgccgtaacccctcgcccaatgagtgaactgcatctcaattatataggtacaaaaaaaggcgcataagcgccttaatcatcctttctactcattgcattatagaatagatagttagctatagaatcgttcatttaactcggccattgctgctaatcgctcacatggctggaacttttcaccgtatttttcagttaattgattaagcttatcgactatttttgttgttcccatactatctatataccggaatggtccaccaaagaagggaggaaaaccaataccgaaaacagcaccaatatcaccatccctaggttgttgaataatgttttcatctaaacaacgaacagcttcattaagcataagcaataaacaacgttcggttatttctgaagccgataactgatttttaggtttaacctgtaataagcgataaatcatcggatctgcacgctttttattttttcctaaagagaaaggtaaggcatgctgattatagagataaaaaccacgaccgtttttacgcccttttctgtcatccgcaataatcgcatcaaccgcaggaggagatgcaaaacgctcaccaaactcattgactaaaataggcgttattttagtaccaatatcaattcccacttcatctaaaagttgaatggggccgactggaaagccaaattgaactaatgccttgtcaatattctctatcgtttccccttcaaccaaacaggttaaggcttcactaatataaggggcgagaattcgattgacataaaaaccgggtttatctcctaccacaatggcaactttgccttgttttttagcaaaagcaacggttgtggcgattgtcttagcatccgttttttcatgagggatcacttcaactaagggcattttttcaacgggactaaaatagtgcagcccaattattttttctggatattgtgctttttcagcaattttatggataggaagagaagacgtatttgaagcaaagatgatcttgccttcacctaaggcttcaatatcagccaccattttttgctttaaagccaaatcttcaaaaacagcttcgacaataaggttagtttgatggaaaccgctataatccaatgtccctgataataaccccatttgtctttggcgttcacgagcagagagccgttttttcttgaccttagttgataacgctttccaactatagttaagtgcctgcgcaatacctttatcactaatatctttaattctaacgggtaaattaccttttgttgctgtcacaaaagcaataccgccccccattaaccccccacctaaaatacctatatggtgtaagttatctggctttgcagatgatcctgtttcatttttcaatgctgttgaggcaaaaaagagatgccgtaatgcagatgaaaccggggtcatggctaattcaccaaacgcattagcttcttctttaaaacctgtttgaatatctttctctaagcctcgttcaataacgtgaagaatacgctctgccgctgggtaatgacctttggttttagctaaagtgcgctttttagcttgatcaaagaggatatttcttcctaatgtggtatttgcccaaaaacgctccataatagtctgttttttagcagcttttttagctgttaaaatccattgggctgcaacatctaataaaatagcttgtggtacaacgtcatcaactaagccaagcttgaaagcccgtttggcattaatttgtcgtccagttaaaatcatatctaaggcggttgtaacccctattaaacgtggtaatctttgggttccccccgaacctggtagtaatcctaattgaacttcaggaaggcctaaacgtgttttactgttatcggagcaaattcgcccatggcaggctaatgctagttctaatcccccacctaaacaggcgccattgatggctgcgacgacaggcaaaggataattttctaattgagtaaaaagatcttgtcctgcttttgctaatgcggtggcctcttctttggttttgcaatctgcaatcattgatatatcagcaccagcaataaaattatcaggtttacctgaggtgataattaatccttttacacctgaatgttgctgagcctgttttaatacattttgaaactgttcaacaaaagcagctttcagtgtattgaccttttcatctacaacattaatggtgataattccgaccttatcgggacgcactgaaaactggaataccggtgatttctctgatgaggtttgtatcctttgttgagtcgccattattccacctccaaaatcatcgctgcacccaatccgcccgcagcacaagctgttgttaaaccaaagccaccacctcggcgtttcagttcatgtaatgtttgagtcaccattctcgcccctgttgcagcaaaggggtgtccataagcaatagagccaccaagaacattgaatttatccatatcaacttcgcctattgcttttgacagtccgagttgctcttgagcaaatttatcacttgcaaataaggttaagttactcaacgtttgagccgcgaaagcttcatgcatatctattagtgttaaatcactcaaagtaagaccggctcttgatagtgctaacggagtcgcataagaaggccccagcaacatatctttccagacatcaatggcggtaaaagcataactacgtagataacctaaaggttgatagcctaaacttttggcaacagactctttcatcattagcacagcagcagcaccatccgtaaggggcgtactattagccgctgtcacactaccgtggcgcctatcaaaggcaggcttcagttttgcgtaagaatcaagtacagaatttttgcgaatattattatcttgatgaaaacctgatttataaggtgggaaaaatgccgtcataacttcgtcatttaattttcccatttcccacgctttggcagctaattgatgagagcgatgtgctaattcatcttgcgcaactcttgaaatatgataagtcttagccatctgctcagcagtatcccccatacgcaatcctgtggaatactcagccactgcgggtgcaacgggtagcagatcaccaaaacgtagttgacttaaataactaagccgttgccctaatgttttcgctttacttaaactgagtaaaacatcggctaattttttactcacgccaatcggtaatacagaagatgaatctgcgccaccagcaatacccactgaaacgtgacctgccaacatactttcagccacattagcaatagcctgaaaactcgttgcacaagcacgggttacactataagcatctgtttttacacttagccctgcgccaagtacaatttcgcgggcaatattcggtgcggcaggcatttgtactacttgaccaaacaccagttgatcaataatttcaggaggaatttcattacggatcactaattcttgtacaaccgagcgccccagctcaaccgcagggatcccccgataagcggttgcttgtttagcaaatgggagacgcaatccactgacaatcgcaacacgatcttttatggtactgctcgctgatgacttcataacgactcctgacaaaatgaattcctaacaccaaagaggtctgacctgattaatagagttaacaaaattttcacttatcagaaacatcattttataagaagtgggagttagcgctcattatttcattcaattagctgtaactcgaagaaaacaataaaaggaaggaataaataatgataaaaaataaaaaaggctactgaatttcaatagccttgaagaagtttaatttcaaaggattaacgtaatcctaattggaagatcagattttctgcttcacaagagaaagtaaaatcagcggttaattgaacgccaccttcgacatcagcaaattgatgtttaatttggcaaggttcagatgcagtggcattagctttagctgttagctcatttaacatcgcttcagcttgagccttatcggcaaaaacgtgctgataagatgcggtacaatttttgttgtcgataatagtaccaacatcaacacaacaacaagcagctgtttcttctgcattacaacgattaattgcgtctgccattttagtctcccaacaaaagaagtgttaattatctatcataatagcaaaaaaataaaataacctgcgttagctcaaattaacctacaattttacaaaaaaaattgattttactgtttgtttaataaacaaaaccatctttattggcatttaatgtaaaattaatgttaactaaatcccaaattttaaatcaaattggaaatatatataaaacaaacttgcaacattaccactattcatctttatacttaagcaactggtctgatttgtcataacgacaaccgcacctaaaatccagcgcttctaatcagaagttacttatttaaaaaaattatgagggtttaggtcatgaaccgtaaaaacctgtttactcgcacagctctcgctgccattgtaggaacactttcctcttatgcaagcgctgccggttttcagttaaatgaatattcaacttcagcactaggtcgtgctttttcaggagaaggcgttattgcagatgatgcgagtgtaggtagtcgaaaccctgccgcattgaccatgtttgatcgtcctgagttttccgttggtgctatccatattaatcccagtgttgatattaaaggtaaatctccactctctggcgccagcactaatgccggcgatatcgccccaagtgctttagtccccaatattcactttgttgcgcctatcaacgataaatgggcaattggtgcatcaggtactactaactttggtttagctaccgactttaaaaaagattacccagcaggtttaattggcggtaaaactgatttaaaaaccatgaacttaaatttaagtgcaggttatcgagttaataaacaatttagtgtcggtttaggcttaaatgcgctctatgctgatgctgaaattacccgccatgtaggtgaagcaggtaagctattgggtggtaccttatctcaacatccagatcctaactatcagggattaggccgttatttatcaagcttatcgccaagtgatcgctttgcacaattaaaaggggatgcttggggctttggctggaacgccggtttattatatgagtttgatgaagataaccgtatcagcttcacttaccgctctaaagtaaaagtgaaatttaaagatggtgattatcaaagtgacttaaaaacgatccctcttcctggtggcaataccatcgtaggtaccgaaggtggcacaatcaaaggtaaacttgatcttaacctaccggagatttgggaatttgcagcttaccaccgtgtcgcccctaaatgggctgtccattataatttagcttataccagttggagtgagtttaaagagttaagagcaacacgtaaaagtgatggccagcaactcttcaacaaagaagaaggcttccgtgatgcatggcgtattgcattaggaaccacttattaccatgatgataattggacattccgcaccggtattgcctttgatgatagtcctgttcctgcggataaacgctctatctcgatccctgaccaagatcgcttctggttaagtgcaggggcaacctacgcatttaataaagatatgtctgtggatgttggtttagcctatatgcacggtaagaaagtgacaattaaagagaagctatctgaaagcttaccattgccggcttatgaatttgaatcatcaggtaaagcatggttatacggtatgaactttaactatcgcttctaagctgatttgctactttaaatacaaaaaatggtcttaaaaaagaccattttttatttaaacaaccagataaacagattaatcgatagaatctaaatcatcttcaatcgcttttgcgtttggattttcacctgttttcccgccattagcatcgaaatcatttttttggaaataggcttcacgcatcattaaatatggatcagatgagttttgtaaaattgcatctgaatctaataattgagctcgcgtttcaataccttcaagggcccatttacccgcagacatccagaaagtgaggtaactcagtactggataggtggcatcagcccaatcgcccccctcttctcgtactgtaaagctgccatagcccggtaataccacataagggccatatcccacaccataatgccctaacgtactaccaaaccttacaggaacttctttttccattgactctctagacattcctgcaacatcgattaaaccaccaataccaaatacggtattgatccaaaaacgtccgaaatgcttagcccctttttcaaaatctccacgtaagatgctatttagcatacttgctggctcttcaaggttacctaagaaattcgatagtccattacgtgctggtggtggaacataatcacgccatactacggctacaggtcgtaatacgtaaggatctaaaacataatagttaaaattaaacatctggcggttaaacccttccaagggatcagaacgactgtcaccattgttaggtgtgcttgcacatcctgaaagtaaagctactaaaagagcaacaccgcacaggcgatacttcataatgttctccgctaactgtcctatgataatcagagcataggtcactattcatcatctttacatataatactgtcaataggcgataagtgatactgttattcgtttttaatcttataagaacattcgggatttatttttatccaatagagctaactatgccccattgacaaaaatattttagattgttttttatgcaaaacacctatagttacatagttcaaagaagaagtaattcgcaataatcaagctaagaattttctcaccttaaagtatctatctatataaaaaatacgctattttatttgttagtttcatccactttatatcaaaaaataaaaaaacataaagatacatatacaaatttacctatccaaataaaacataaaaataatttatcaatattttttaattataataagcaaaattagaatggattaaatatagtcataaatagataaaataaagatatcatgattaggctatcaatagctaaattatcattttcgatattaggatataatgaagaaaaatttctctatttttccttgctgacccattatatcatcaagttttaccagataccttcagctaagttacaaattaatcgagatatcaagccaccaacatacactatcaattattcctgaaaatgctaagtatgcattaggctctcaacgtagcgatattaaaacatcctgtaatgtagatacttttttaacatttacagtttcagatttgtttgtagaaaataaagctaacacatggaaaaaactttagtgtaactttagaaaccagaggagcagaaagtaatgtaatttattgatatataaatcaattaaaaaacctctaaataaaacatcgatattcctgaagaatttagattatatagagtaagctactattacatttagtttttgaatttaacatttaaacaaaatgagtaataaatatcacattataagtaagctattattaataatctctttttgatgccccactacatataaaatcaaaaagcattaaaattttcattactcattattaaaatgggcagaaataacaatataaccattaacgaaatgattatacttttatgataaaaatttaaacaatagctttacgattcattttaaataaaacattttttgatattctaaattagatgaaaaataataaaatattttcaataacatcataatttgattaaacagactaaaataaaagaaaatacttaattttaaaacttaaataataatttaaaaggggtatcataatcctctaatttaataattcattattcattcacgaaaaggaagagtaaaatgaaaaagaattttctctattttaccttactagcggctatatcaacatcagcgctagctgtaacaccttcggctcaattacagatcaatggggatataaaaccgccaacttgtacaatcaatagttctaacaatacagaagttgtctttgactatggccgcatatcgccaagcttgataccacaatcttcaaactatcaatatgtggatatgaaaccagaaacaagcatcagtattgaatgtgatgctaaaacttatttgacttttatacctactgacacatatggtgatgtagatcttgattataatactagttttgatagtgcttggtttcgcttagttgataaagccaacccagataaagctgttggggcttcattttttaattggaaagatgcaactgttgacggaaaaacggcttttataagccgagcaacacctaaaacagctgaagtaggggtatctgtcttagttaaaaataatattcatgggtggacatcagagcaacaagaggatgtatccgccgcatctcttaaattagtctcaggtgaaatctttaccacaaaatttataccaggaatatcatctcatacattcattctttctcgtgataagctagctaaaaaagcgatagatattagtaatggactcgattttattggtgaggccgtattaacattctctttcggtgtttaaaaagtttaacaaaaacactctcactatattaacaagctattagcttgtatacattaaacgggtaggagccttctttattttattcccctcccgtttattgctttaattttttatgactcattcaattaacctactaattttatatttatcatttttattacgatctactgtgacaatataaaaatatagaaatagctattaaggcagtattatcattgattacaaaataaaccttgctaactcaatgactaaataccttgatccccccaccacaaaaacggtactatacggacactgagaaacagttaagcaccctctcgcaaaatgttcccttagttaaatggatataacgagcccctcctaagggctagttacaggttcgattcctgtagggaacgccaattataacaacctatcattttacccactgtttattctcgctataaagaataggttatttattaacaacacccaatgagagtttggtgatttaataaagccttatcaaaaataataacctttattgtcgataatttggcctaaattcctatttcactgtctgcaccacagaagtaaatcaaatctatattcggtagcttatatcacctgttatggacaggagaatttaaatgatactttggctgatctcttttggcttaatttcaggtattactacatggttatttggttttggcggtggttttgttactgtgcccctactctatactctcattcttacactttgggcgggtgatagcttagcgggtgaacatgctatgcaaattgctgtggctacctctgcgctcattatgctgttttccgctattattacgaccctaaaacaccataaggcgaaaaaaatagattggaaattaattatgatcttattttgggggattgcattcggtgggatcttcggtgccttacttgcctcatccgtccaaggtgaatggatccgatggatttttattggctatctattccttactatcttagattgctattttcgccccggatttatggcgccacgcaaagaaatacaaaaagtaaccaacaaaaaagaagcgttaactggcactattattggcattattgcagcttttttaggtgtaggtggaagtgttatgaccgtacctttattacgccgtagaggtatgtcaatgactcaatcggctgcaatggcaaacacattgacattccctttagcattaacggcaacactcacttatatcttattgtctttcactaccccgttaggggatagcgctggatttgttggctatatttggataaaagcagccgttattctaatctgtagtacatggataggattaaaaatagctgaacgttttttatcacgtataccggataaatggcatgcgagagtttatccgctgttattgatattggtgttagtcgttatgctgaactaacccgctaacatacctctggacaaggcaattcttatctatctgtattgcctttaatatttcacacaaaagtgaaattgttacatttactcgactcaatagtagcgtattttgacaccctagatacaacccaataaccattaatataattaattaaaaattatacataatgaataatatattataatttatcttatcttttttatgatggcataattatctacctcttagataaattaaatcttaattgacatttaattctatcttttatagatatttcattattaaaataagacattatagcaaatataataaaatagcttctttagcttaagaaaattaaaaaacttgtttagtctttatttcaataacaatttaattacaattaaacctctcaccgatatatataaaaatacatatcgattgaaaattatatcaatattttttcttaccttaataatatattatagatacactttaaaagaataaatcattcctataaccatatgaatattaaaggcatggttgtttttttataaaactcttaattcatttcctttaacaataaccagcccctaactaatgccttagaagaaaataattatcattttattttgtctctatttgttaaattattttgtgatatttattaacttctttgttgctattatttattatttccaactaactcatcacttattaatgaataaattgaagacaccatcaaatatttatttaaccaactgtatataatatttagctataagaagaaactggaggttatatgagtattagtcgtcgttcttttattaaggggatgggtataggatgtgttgggtgtacggtgggaagtttaccaccaggggccctcgcacttaatccagtaacatctcttaagggtcagtctaaattaacaccaagtttgtgtgagatgtgttcttaccgttgtcctatagaagctcaggttgttaataacaaaactgtctttatccaaggtaaccgaaattcaccacatcaaaaaactcgagtctgtgcgagaggaggcagtggtgttagccttatttatgatccgaaacgcattgtaaagcccatgaaacgcaaaggccctagaggtgccggagaatgggaagttattagctgggaacaagcttatacagaaattgccgaaaagatggcaagcatcaaacaacattatggtgctgaaagtatctttttctcatcaaaatcaggctctctttcctctcatttatttcatttagcggcggcatttgggtcaccaaacacctttacgcatgcatcaacttgtcctgcgggcaaagccattgctgcatcggtaatgatgggtggtgatttaaaaatggatctcgcaaattctaaatatattctttcttttggtcataatctttatgaaggaattgaagttgcagaaacctatgaattaatgacggcacaagagcgtggtgcaaaattagtcagttttgatcctcgattgtccgttgtttccagtaaagcaaatgagtggtttgctatccgaccaggaggcgacttacctgttctaatggccatgtgtcatattatggtaaaagaaaatctttatgataaagattttatagaaaaatttactgtcggtttccctcaattggtggaagtattacaagataccacgcctgaatgggcacaagctcactctgatgttcccgcaaaagatattattcgcataacacgtgaaattgcagctaaagctcctcacgcattagtcatgccaggccatcgcgcaacctttaataaagatgaaattaatatgcgcagaatgatcttcaccttcaacgccctactgggaaatattgaacgtgaaggtggcatgtatcaaaagaaagctgctgcaaaatataataaattagcgggcatcgacgttgcccctgaattagctaaaccaaccgttaaaggcatgcctaaaattacggcaaaacgcgtcgatgctacagcacctcaatttaaatatatcaataaaggcggtggtattgttcaatctatcattgactccacactccatggtgtaccttaccaaaccaaagcttggattatgtcacgccataatccatttcaaacagtaagttgccgacctgatctagaaaaaacagcccaaaaactcgacttaattgtcagttgtgatgtgtatttaagtgaaagtgcatcttatgcagattatctgttaccagaaagcacttatttagaaagagatgaagagatttctgatgtctctggtttaaatcctgcttatgcattaagacaacaagttgtcgaacctattggtgataccaaaccaagttggttaatttggatggaattaggaaaaaaactggggttagcaagttattatccttgggaaaacatgggagttcgtcaactttatcaagttaaaggggatgaaaatctctataaagagatccaccaaaaaggctatttatcttatggtattccgctacttttacgtgaaccatcctatgtaaaagcctttgttgcacaatacccagatgctatcaaacatgttgatagtaacaatatgatggaaaaatctctttcttttaaatcaccaagtggtcttattgagatctattcggaagagttagaaagtctattagagaattatggtattcctcgtttccataacttcccattaaaacaaaaagatgaactctattttatccaaggaaaagtcgcagtacataccaatggtgcgactcaatatgtacctttattagcagagctaatgtggaaaaatcctgtctggttacatcctgataccgcaaaaagtcatggaattaagcatggtgatgagatcattttagaaaatagcgtaggcaaagaaaaagcccatgccttaattaccacaggtattcgtcctgacacagtgtttgtctatatgggttcaggctctaagaccggcgaaaaaacgccagcaaccacaaatgggatccactgcagtagtttattacctcatgaaattagccctgtttcaggcactgatgtacatacttcaggcgtcaaaattagtctggcttaaggaaaaaaataacgatgaatagcaactctaaacaatttgtcatgctacacgatgaaaaacgttgcattggctgccaagcttgtaccgtagcatgtaaagtcatcaatgatattcctgaaggatacagccgattacaagtacaaattcaaggccctccctcataatgatgaggcaggagatccacattaccaatttttccgagtttcctgtcaacattgtgaagatgcgccttgcgtttctgtctgccctacaggtgcttcatttattgatgaaaatggcattgtacaggttaaaaaagagctctgtattggctgtgattactgtgttggtgcttgtccttatcacgttcgatatatcaatccattaacacacattgccgataaatgtaatttctgtgctgatactcgactaacagaaggtgagttacccgcttgtgtaacggtatgtccaactgatgcattggcatttggtcgcattgactcacccgagatccaagcttggatcaaacagaaatccgtttatcaataccaattagataatgtcggaaaaccaaatttattccgccgtaaagagatccatcagggagataaagcatgacaagtatctggggagccgaactctattatacgccagattactggcctgtatggttaattgcagcaggtttgatcattgtcgccatgatagccatattggtgctacatggttttttacgttatgcactggcacctaagcaaagtggtcactatgaagaagagcgtgtttacttatactctaaagccattcgtttttggcattggggtaatgccttactgttcattcttctattaatcagtggattgttaggccatttttctatcggtaatgttccatcgatggtactactacataaaatctgtggttttattctcatcgctttttggataggttttgttgtaattaacctaaccacaaataatggtgtacattacaaagtcagaccacaaggattaattggacgctgtatcaagcaagctcgcttttatctttatggtattatgaaaggtgaaccacatccttttgccgcgactgcaacagataaatttaaccctctccaacaacttgcttacttaggtgttatgtttgggttagttccactacttcttatcacaggcgtactatgcttataccctgaagtcctaggttatggctattggatgttaaaagtacactttatattaggcatcgttgcactcatgtttatttgtgcgcacttctacttatgtactttaggcgatacttttacacaaacattccacagcatgattgatgggcatcatcgacatcaaaaacatggtgaaagcacaacaacaaaaaattgataattagcttttgataattattaatatccccatgcctgcttaccgagcaggcatttttacgtattggtatttttagctaagatcactgatacgtaaaaatacagaatattctcctattcactacgatttttttatttattattaacagaacaaaattgatatagcttaattttctaaaaatgaatctttttatgatgatattctactaaattagtatttttttgaactagctagtttttatttttactaaaattttttatatattaaaaaatataattaaccaatcttttatataaagattttttagtcataaataacagtaaaaaatagcgacaaaaaagatatgttataggtaatggtcaatattattatactaatggaataatttagatattcttattactgttaaaaaataaaaatgcccattaagggcattttatttagattcaaggcgtaaatgataataagataattcttattattaaataattagattaacactctcataagaatcatcttatttatctaattatttgtatactagctaactttctaattaaaagcttacaatcagaaaatagaaagagccttattgtcgaaatgagctgggatatgttgttcattattctcaggaacatcaaccataccccccataacatcttcaaagaagttacctatattaatgcctaacacatcaaggactttaactaagcaatcaatgtcgatacgattaactccgcgttcgtagcgaaataattgctgttcactaatatcgatttcttttgctaactgaaatacggtataaccttgagattttcttaatgattttattttttgtccaacagcgtaagcaactggatacttgttactcataatatgttctcgcttttcactttgattgatatctaatttataatagtgcgggccatcattaataatatatgaaaaaatataatatcatgggcaccttttttaattttattaaaataatattttgacttgataagagtattacaattcataacaacacttatcatatgtaaataatatactacgcatttaaacactttcaaccagtcaaaaaatgacaataataactaacacctttactctcactagttattaatacctaggagaagtcacaaatccaatattaatcaataggttataatatattaaatataaatatagtctttttttatctttagaattactcatgtattagatttatattctattaatgcaataatttacgaataaatatatcaaattgacaaaaaaataatcaataaatttcagtctaatttatttaaatttgtgaattaacctcgttaatagaacattttttacatttttacaaaaaatattgagcaatctcaataaattctaattaatacaaaatgacacagattaaaaccaatagaaacaattagttacataattttcataaagtaatagaactcaatctaattttaaacatttgttaattaatttatataagcataaacacttagcgttagagtacttattaaatttaaataaatttccaattattatttactataatttgaattataatttccgttatggattattatttatttatattttttcttgttctcttattaaagataatccaaatagaaaaagaccataaaaagaagaataaatgataaaaactattttatatcatatggttataatacatttcttaatttatagaacatctaatgttctactaaaaacatgccagcatagctttttgccaccttccgcaaaccacatatttaaacaaaagaacttcttatcagttattgtaacttagggtaaatatttgctatattaagctgttaaatgaccatttaacaatgatctcattttgttaaaaattcaaaattagataatcctttaatcctaagtgtaaatacttatttcttataaagtgtatttttgcctctctgcaaacattaatatttttatataatttatctttctgctatatacacaattttctcttttttcgtgtaaaaaaggaatttccccctttaagacaacatctaaacaaatgaaaatgtcgtttattggcatagatcattttcttttgaattcataaggatagcgacttgataaaaatcaacaattaaaataaacgtttaaaatcaacaaattaatataaaaattttgttcaaaaaatagcaccaaaaaaaacgatatttcagaaaaaacacataataatttttaattaaaaagataatttggttactaaccacataaaaatattaagggtgtttactgtaaaggataattttgaattatttttattttaacccatataaaaaccataatacgtataattaactaataataaaaaaatactttttttttaaaattaatttaaaaatcttatctatatcaaggcgataaaaaatgaatatccttgacgttgctatttttaaactatcttataagcaattaaataacctatgtgcactcaataaaagtatcatcttagctatttctctcagtaattttgctaatccttttaaataatcatttcatcatcaatatttttaacactactagtagggtaaataagtcggtaatcaacccctgatagcacaaaaataattcagaccgataaataggagaacagaacagggatcacagctcgatataaaaccaccaagtagacagatagatagacagatagacagatagacagatagatagatagataggtcgatgtagtctagtaacagacctgaatacaaaatgagcgctatggataatagataaggataatagataaggataaggataaggataaggataaggataaggataaggataaggataaggataaggataaggataaggataaggataaggataaggataaggaataataaaagaatttttatcgaatgatataaaaagaagtggtgggcggtattgggctcgaaccaacgacctcctccttgtaagggagatgctctaccaactgagctaaccgcccgcttaattattaaatggtgggtcgtgggcgactcgaacgcccgaccaattgattaaaagtcaactgctctaccgactgagctaacgacccatttaataattttacgtaaaacttgaggtagtattgtgaatggtgggtcgtgggcgactcgaacgcccgaccaattgattaaaagtcaactgctctaccgactgagctaacgacccatcacaatgttcactactctttgttgtatatttaggaatggtgggtcgtgggcgactcgaacgcccgaccaattgattaaaagtcaactgctctaccgactgagctaacgacccatacctaactgtgtgatattgcgtaaaataaccggatgaagtggtgggcggtattgggctcgaaccaacgacctcctccttgtaagggagatgctctaccaactgagctaaccgcccacttcataatgactaaattctcattaccacgctttaatgtaattggtgggcggtattgggctcgaaccaacgacctcctccttgtaagggagatgctctaccaactgagctaaccgcccaattacattaaataatacaactatcacaacgaataataatggtgggcggtattgggctcgaaccaacgacctcctccttgtaagggagatgctctaccaactgagctaaccgcccgtcgtgatggggtgcattatagggatactgcgctatgagtcaacgatttttatcggttttttatcgtaaaaatgatcgttcgttttatttttagtcaagatgctttttttagcaccataactgacacagcaattaaccaaaataatccgttgttgttacttcgtcaaacaaaaaataacctatttgaaatttttctgcaggttaaaagcttaatgccattgaggaattagcatccagtgataaaataaagcaacaatttcgtttttttgataatcacggttacttatcttctatttttggctccttatataagaaagaatataagtaaaacgtactaaggcaatctcaatgagtaaaataaaaacccgttttgcaccaagtcctacaggctatctacatgttggtggtgctcgtactgcactgtattcctggttatttagccgtcacaacaagggtgagtttgtactgcgtattgaagacaccgatttagaacgttctactcaacctgccattgatgcaattatggacggtatgaattggttaaatctaaactgggatgaaggtccttactatcaaaccaaacgctttgatcgttataatcaagttatcgatcaaatgttagcagctggtactgcttatcgttgttattgttctaaagaacgtttagagaaactacgtgaagatcaaatggcgaaaggtgagaaacctcgctacgatggttgttgccgtcacggtgatcacaaccataccccagatgaacctcatgtagttcgttttttaaatcctcaagaaggatctgtgatttttaatgacaaaattcgtggcccgattgagtttagtaaccaagagcttgatgacttaattatccgtcgtactgatggttcgcctacctataatttctgtgtagtgattgatgactgggatatggaaattacacacgttattcgtggtgaagatcatatcaacaataccccacgtcagatcaatatattaaaagcacttggtgctccagtacctgaatatgcacacgtatccatgatcttaggtgatgatggtaaaaaattatctaaacgctataacgcagtaagtgtaatgcaatatcgtgatgacggttatttaccagaagcgttattaaattacttagtacgtttaggttggtctcatggcgaccaagagatctttagcatcgatgaaatgattaaagatttcactttagaagctattagtaaatcagcaagtgcatttaatactgacaaattactttggttaaaccatcactatattaataccttacctgctgaacaagtagccgtacacctagattggcatatcaaacaacaaaatattgatactagtaatggcccatcactggttgaattgattaaattactcggcgagcgttgcaaaacattaaaagagatggcggaaagttgtcactacttttatgttgactttgatagtttcgaagaaaccgcggcgaaaaaacacttacgtcctgtcgctcgtcaaccattagaagtagttcgtgataaattatcagcaattactgattggacagcggaaaatgtacataaagcaatccaagaaaccgctgaagaattagaagttggtatgggtaaagtcggtatgcctctacgtgttgctgtcacaggtgcgggccaatctcctgcactagatgttactgttcatgctattggtaaagctcgtagcatcgctcgtattaataaagcattagattttattactgacagagaaaatcaagcttaattgagctgattatcttatttcacaacgaagagtcgtcacttatttttaagcggcgactctttttttgtattctttttcatcaatcaataaataatgtgagattaagtgattgacagcattgtgcttgttgcctattatcaagcccgttccagtatgttggggctatagctcagctgggagagcgcttgcatggcatgcaagaggtcagcggttcgatcccgcttagctccaccaatatacttttgaacaatccattatgtggggttatagctcagttgggagagcgcttgcatggcatgcaagaggtcagcggttcgatcccgcttagctccaccagaatcttaagatcctgaagagaaatcttcaggattttttattttcaccaatgtattcacttaattagtgattcacactacccgcaaagataaaactactgcgcagtatatcccccatctaccgcataaaaagcgcctgttgaaaaactactctcatctgaaagtaaaaaagccaccatattagccacttcttttcgcgttgccattctcttcatcggatgtgttgatgccatccattgacgaacttcatccggtaactgttgcattcgcggtgtgtctacatacccaggccctattgcattcacacgtataccttgctgtgcaaattccaaggcagctgaacgggtgatccctaacacagcatgtttggctgcagtataagcagaaataccggcaataccgacaataccatttgtcgaagataaattaacgatactccctccaccacttcttagtaaggccggaataccatatttcaatccgtaaaatacgccgttaatatcggtatccataaccgctttccaatcatcaatattataatcaacaatcgatgtattatgcggacctgtaatacctgcattattcactaatccatgtaatgcgcctgtttgtgctaatattgcttcaaacatgcttttaacttgctcaggtgatgtcatatctgcttgtaatgctatgactttttcacctgtaggatcgattgtgtaagcggtttttttaacctgttctaattgtcgcccacttataaagactgttgcacccgcttgatataatcgttgggcaacgccttcccctactcctgttgcagccccagtcactaacaccgttttgccttcaaaataactcatattcacctcagttcacttagtttaagtaattaactttagttaatcatgttaaataggatatttgattaactaaagttaatcaatataaattttcttcagctaaaatgagctgttattattaacttcaattaatttgatagaaaaatgtaggtactaatggagcaacttgagctagaaaatgccctatcgcttttacagtgtactctggttgcacaacgcacccgttatacaccagagcaagtaacttggggacaatatgatattttagaattattgcgtttacgcggtgatttaacgccctctcaactttgtgaaattttagctatctcacgccaaaatttatctaagtttatgcgaggattaaaatcattaggttttattgctcaggatcgttctaagaaagataaacgtgaattaattacgcatttaacagatgaaggtaaagcttttttagcaagagccgctttaggccgaaaacagaacgcacagaagctacaagcgcaattaacacctgcagaacaagctatgtttattgaattgagtcataaagttattaacgcactaatagcggataagttacctacagagcctgattaatgcgactgctttaatggttttagtaacccttctaagccatcaattttaattgctagggtcatttccattagttgccctagctttccttcagggaaggtgcctttcttggcaaaccacaataaatactcttcaggtaaatccaccagcattcgccctttatatttaccaaatggcatttgtgtgttggctatatctataagatgctgtttttctagcatgatctctatcgctttatcgagaaggaatgataaggattataaggtaatttaacgataaaaaaagcagtaccgacgggtactgcttgatttatgttacatgataactaagttatccatcttacattgttatttatttcacatgctatctgtcttatctcaatgattaaacaaacaggcctgtgatagcagcagataagaagctaactagcgtagaaccaaatagtaatttaagaccaaaacgagaaaccacattaccttgcatttcgttcagacctttaatagcccctgcaacaataccgatagaagagaagttagcaaatgagactaagaagacagataagatcccaacagagcgaggtgttaattcagcagccagatcttgcaagcttcccatcgcgacgaattcattagagactaatttagttgccatcacactacctacacgtaatgcatcttgctcaggtataccaatcacccatgctaatggatagaacacataacctaagcaatcttggaaactaataccgaaaatcatactaaagatagcgtttaccgcagcaattaatgcgataaaaccaatcaacattgccgcaacgattaaagcaactttgaaaccagctaagatatattcacctaacatttcgaagaagctttgaccttcatgcagattccccatctggatatcttcttcattttcaacagaatatgggttaatcactgataggataacgaaagtactgaacatattcagaaccagtgcagcaacaacgtatttaggatcaagcatagtcatataagcaccaacaattgacattgataccgtagacatcgctgtcgccgccatagtgtacatacggcgctgagacattttgcccaatacatctttataagcgataaagttctcagattggccaagtactaaggagctaaccgcattaaacgattctagtttccccataccgttcactttggacagcactgtaccgataatgcggatcacgaaaggcaatactttgatatgttgcaaaataccaattaatgcagaaataaagatgataggacataatacattcaagaagaagaatgctagaccacctttcatcataccaccgaagacgaactcagtaccttgtgcggcataacctaataagtgatcaaatagcccagcgaaaccacggacaaagccttcaccaatatcagaattgaggaagaaccatgccaatgcgatttcaataattaataactgcacaatataacgcagacggatccctttgcggttattacttgcaataaatgctaatgcaccaataactgcgagagccaaaacaaagtgaatgatagaagacatgcatgctccaaaaataaaaataaatcttggagagcattttatgtaacgcgtaacattacgatgtgattattgtcacaatacagtgaaaccatatacacactatttattaaataagataggttgatcacactttaggagtaacttaagtaacacgaaatgtgaatttagcttaaattaaagatgctactgagaactgctctcaatagcatctaagtttattgtaaacgattatttagattgatcaagcaagcggatcatttcgtcttcatcaataacagtaatacctaattcatttgctttggctaatttagaacccgccgcttcaccagcaatgaccatatctgtctttttcgaaacactaccactcacttttgcaccaagtgcaactaatctatcttttgcttcatctcgcgttaattgagaaagagagcctgtcagcacgactgttttaccagcaaaaggattatcacctgcttcatgagtagccacaaccggtgccggccaagtaatgccaatgtcattaacaagttgatcaatcacatttttattatgttcttcttggaaaaaattaaccacatgctttgcaacaatatcacccacatcaggaactgcctttaaggcttcaatatttgcttcacgtaatgcctctaatgaaacaaaatgagcggttaatccattggccgttgcttctcctacttcacgaataccaagggcatagataaaacgggcaaaagtggttgattttgctttttctaatgcattaagcagttttttggctgatttctcccccatacgttctaaaccagataagatcttttcatctaaacggaataaatcagccggtgttttgacatactctttttcaaccaattggtcgataattttatctcccatgccgtcaacatccatcgcacgacgagaaacgaaatgtttaagcgcctctttacgttgcgctgcacaaattaatccccccgtgcagcgggcaacagcctcaccttctatacgctcaatatcagattgacaaatagggcattgggttggaaaaacaatttcttgtgcattctcagggcgtttttcttcaatcacactcacaacctgaggaataacatcgcctgcacggcgaataaccaccgtatcaccaatacgtaatcctaaacgttcaatttcatcagcattatgaagtgtggcattactgactattacccctgccacttgtacgggatctaaacgagcgacaggtgtaatcgcccctgtacgccccacttgaaattcaacatctttaatcaccgtcatctgctcttgggcttggaatttgtaagcaatcgcccaacggggagcacgagacacaaatcccaactcttcttgtagagctatatcatctactttgataaccacaccatcaatatcaaagcctagattagggcgaatttctgctacatgatggtaaaaatcaagtacagctttagttccggtacataatttaatagcatcactaacaggtaatccccattttttaaattgctgtaagcgtgcataatgacttgtcggtaattcaccgccttcaagcacgccaacaccataacagaagaaagtcaaagggcgcttggctgtaatacgaggatctaactgacgtaatgaacccgctgctgcattacgaggattagcaaatacttttcctcccgtgcgtcgagcttcttcatttaaatgctcaaaccctttttcagtcataaagacttctccacgaatttcaattcgtgcggggatattatcgccatataaacgcaaaggaatggctttaatggttctgacattctcagtaatattttctccagtggtaccatcaccacgggttgcagcttgtactaagcgaccattttcatacagtagacttaccgcaagtccatctaattttaattcacaacaaaaagtgatctcttcattatttttcagacgttcacgtaaacgtttatcaaatgctaaataggttgtttcatcaaaagcattatctaaagagagcattggaatttcatgtctaacttgctcaaaagccgttaaaggtaatgcccctacccgttgagtaggagaatctggggtaatgagttcaggatgttcggcttctaatgcttttagcttattcattaagcgatcgtattcagcatcaggaatttcaggtgcgtccatgacatgatagagatattcatggtgacgtagtgtaacgcgaagttcatcaatttgttgttgaatattttgattcatgaggtatcaccaaagaaagaaaagcccccgcaagcgggggctgaggttgttggcaatgtgagaaaaaccaagtttccccactttgtattatcagccgaaaatcaagtcattaattttcctgatttctttaaatctatccaacctagcaccgcaagcgagcttttgataaaaagactattgatgtaaatctagtgttctacgaattctagatttataaagttcaattttttgtggtgttaacagtttgcgctcttcatcaagcacaacaccgcccacatcagaggcaatacgctgagctgcttgcaacatcaatttaaagttttggttagcatcaccataagatggcaccatcataaacatggatacgccaggcgtggttaattcagccatcgtatcaatattgaaagtacccggttttaccatattggcaagactaaacaatacagggccattacccgtcgggttaagatgtcgatggaaaatattcatcgcaccaaactggaaacccgcttgaataatgctctgcattaacacctcaccgtcaagcatttgaccatgatgagcgctgacatttaatactaataccagctcttcttctgcttttggctcttctgttccggataaagcttgctcagcttgtttcacatcagatgaggtttcagcatccaatggcctatctgtatcagtggtatgtatttcatcactagcaacagagttcgacgatactggcactggctctacatcggcaagttttgtctcactaatatcaccttcttttacatcagcatggtttacctctacctcgggtatcggttgtttttgctgaggcgcagagtcattattttgttcaataacatcaaaaacaccaagactaggctctcgttgtaatgaagtatcgttagaatgtccctgtgctggtgttccagacataagtggatctttatctgcaactgaggattgtggcgcaagtgttggctccgatttaaccggtggcacactttgagcctcctgcgttgaagttaaagacgacatctgatgatttgcctcagtatactggggttcatcatcgttctcatctgactgataattctgtttctgacgttttactgggcgattacggaaaagcttagaacgctcttttcgaccaatccataagccgtgtaataacaaagctatgattaaaatcgcaccaacaacgattaatatcagacgcaaattttgctgcatcatttctatctctgttgtcttgaggtttaatagccacaatggcgaatattacttttactaagagtatttgccaatgcttataagtgcaagccaatacttaattttcttgtcacaaagatacactcttcaataccttatgcgcattttttagacaatttatcactagtaaggctgattatctctctatatgatactagcttgcccttataggagagaataggaagtatgacaaatttgacagaatcgaccaaaaatttaaatggatttcactattttgcacttgggtggcgattaattactcgcccgggtctaaaacgttttgttattttacccttacttgccaatattattattctcggtagtgccttttggtggttatatggccagattggtgaaatggtcaattggatgatggaaaaagtccctgattggctacagtggttaagctatgttatctggccactgtcagttatttttattttgctggtctttacctatttctttagcaccatagccaatattatcgcttcgccttttaatggattattagcggaaaaattagaaggccaaataacgggtattaatcctccggataccggcttattaggtattacaaaagatattccacgtattttaaaacgagaaatcatcaaggtcgtttattatttgccaagagccattgtattgttattgctctattttgttcccgttgttggacaaactatcgccccaattctttggtttatatttggtgcttggatgatggcaatccaatataacgactttccattcgataaccataaagtctctttcgccaatatgaaatcaacgctgaaaaaagacaaatggaacaatttacaatttggtatggtaattaatatcttcactatgatcccaatcttaaacctagtcattatgccggttgcaatttgtggtgccactgccatgtggtgtgatcgatatcgtcatcaacatgtacaagcaggccagtggtaataccactggtttcattgtgattagaatcttttggaataaaaagtaaaaaaagttataaggatattcataaagcttatttccatcttttgcttgatggcgtatggtaatttcatctgaccttataaaaaatcatgtaccgaggataaaaatgagcaaaattttcgaagataactcgcaaactattggccatacccccctagttcgtttaaaacatttcggtaatggcaatatcttagctaaagtagaatctcgtaatccaagctttagtgtaaaatgccgtatcggtgcaaatatgatttgggatgcagaaaaaaaaggtatcctgaaacccggcgtagagctagttgagccaaccagtggtaatactgggattgccttggcttatgtagctgctgcacgtggctataagctgacactgactatgcctgataccatgagtattgagcgccgtaaattattaaaagcattaggtgctaaccttgtgttaactgagggcgctaaaggtatgaagggagcgattgataaagcgaacgaaattcgtgatagcgatcctagccgttaccttctactacaacaatttagtaatccagcaaacccagaaattcatgagaaaaccacaggccctgaaatttggaatgacactgatggcaaagttgatgtagttatcgcaggtgtcggaacgggtggtaccatcacgggtattggtcgctatttgaaaaatactcaaggtaaagctgtcaccatggttgcggtagaacctaaagattctcctgttattagccaagcattagcaggtgaagaaattaagcctggtccacataaaatccaaggtattggtgcaggttttatccctgaaaacttagagttatcactattagatcgcgtgatccaaattactaacgaagaagcatttgaaacagctcgtgacgttatgaccaaagaaggtattttagcgggtatttcatccggtgcggcaattgcggctgcagtgaaattagctaaagagccagaatttgctaataaagaaatcgtagtgattttaccttcttcaggtgaacgttatctcagcaccccactttttgctgatatctctgacagctaaatcgcgtcacctaaaatgtaaaatttttattaaaaaagcaccttcagggtgctttttttgtggtagagatcaaactttgttatccagataggtgatttattctgtcgagtttagtatttaatcaagtaattatttcgaaggtcgaaattaatcagaaaataggcaagtgataaaaacagcactgctttcaatttctggggactatttttatcggataacgtaacatggcttatattatctgatattgctacgcaaagcaggacaatttcatctacacttactaagtcctgacttaatgtgaataattgagttataaaaggaaaaaatcctatgtaccagcaagaagttactattacagcaccaaacggcttacatactcgtcctgcagcacagttagtaaaagaggctaaaactttctcttctgatattagccttatttctggtggtaaatcagccagcgcgaagagcttattcaaattacaaactttaggattaacccaaggtactgtagtcactatttctgctgaaggcgaagatgaaaaacaagcagtagaacatttagttaagttaatggctgagttagagtaatccagttacctttcgctattcattaacgtcctattttcccctgaaaatcgctcaggggaatttataactcgatgattttaaaacagcagtgtctcttgatcctatttttttaaaattatcaccagcaagtcgtaggataaattatgatttcaggaattttagcttcaccgggtatcgcatttggtcaagctcttctacttaaagaagaacctattattattagccaacgtaaaatccaaagtgacgaagttgacacccaaatcgaacgttttaaagatggtcgtaataaatcagcgcaacaactagaaatcattaaagcccgtgctgaaaaaaatcttggtgccgataaagctgagatttttgaaggccatattatgttattagaagatgaggaactcgaacaagagatcatatccctcatcaaaagtgacaagaaaaccgcagaagcagcggttcaatctgttattgaagatcaggcaaccgcattagaagccttagatgatgagtacttaaaagagcgtgcggctgacgttcgtgatattggtaagcgcttaatgcgtaatatcttagagatgccaattatcgatttaagtgctatttctgaaaaagtgattttagttgctacagatttaacgccatcagaaacagcgcagcttagcttagacaatgtgttaggctttatcactgacttagggggtagaacatcacacacctctatcatggcgcgctctttagagatcccagcgattgttggtacatctaatgcaacagaaaccattaaaaaagaagattatctggttcttgatgcgattaacaataaaatcattattaatccttctgatgaagagctcgaagcattaaaggctatcaaagaagagtacctacatgaaaaagaagagctggcaaaactaaaagatttaccagcaattacccttgatgggcatcaagttgaagtttgcgctaatataggtactgtacgtgatgtcgcaggtgctgagcgtaatggtgcggaaggtgttggactctatcgtactgaattcctatttatggatagagattccttaccaacagaagaagagcaattccaagcttataaagctgtggctgaagctgtaggcagtcctgcggtcattatccgtactatggatattggtggcgataaagacttaccttacatgaatttaccgaaagaagagaatccattcttaggttggcgtgcaattcgtatttgtcttgaccgcaaagagatccttcatccacaattacgtgctatcttaagagcgtctgcttttggtaaactacgtattatgtttccaatgattatctctgttgaagagatccgagcattgaaagcggaacttgaaatactgaaaagccagcttcgtgaagaaaataagccttttgatgaatctatcgaagttggtgttatggttgaaacgccagcagcggctgttatggctcgccatatggcaaaagaagttgactttttcagtattgggactaacgatctaacacaatatactctggctgtagaccgtggaaatgagctgatatctcatctatataatccaatgtcacctgctgtacttaatctgattaaacaggtgattgatgcatcacacgctgaaggtaaatggactggaatgtgtggtgagcttgccggggatgaacgggcaacaatgttgcttctgggcatgggattagatgagtttagtatgagtgctatatcaattcctcgcatcaaaaaaattattcgtaacgccaattttgatgatgcaaaagcactggcagagcaagcacttgctcagccgactgcaaaggaattaatggacttagtagaaacttttactaaagaaaaaacactgtgctaataacgttagccagagcccggtcccaactaaaataattaggagaagattcatgggtctgtttgataaattaaaatcactggtttcagaggaaaagaaaggcagtggcacgattgatattgttgcaccactttctggtgaaatcgtcaatatcgaagatgttcctgatgttgttttcgctgaaaaaattgtaggtgacggtattgctatcaaacctgctggtcataaaattgttgcaccagttgatggtactatcggtaaaattttcgagactaaccatgctttctctattgagtctgacaacggtatcgaattatttgtccacttcggtatcgacacagttgaactaaaaggtgaaggatttaaacgtatcgctgaagaaggtcaacaagttaaagtcggtgatactgttttagaatttgatttagctgttttagaagaaaaagcaaaatcggtattaacaccggttgtaatttctaatatggatgaaatccaaggtttaactaaaatgacaggcccagtaactgttggtgaaaccgttgtaatgcagatcaaaaaataatttttaatctgttctcacttttaaaccgccacatttcctctgtggcggtttttatatgcaagcgaatgagctttaacgagcgcagaaaactcaaccaaacaccccagttgataaatagcgatcgcctctatcacaaataatcgccacaatcacagcccctgggttctctttagcaacgcgtattgcaccagctacggctcccccagaactaacgccacagaatataccttctttactcgctaataggcgcatggtttgttctgcttctgtttgggacatatctataacactatcaaccaactcttttcgaaaaataccgggtaaataggctggagaccaacgacgaatacccggaatttgacttttttcttccggttgtaaaccgacaatttttactgtgtccgattgtgtttttaggtaactccccaccccagttatcgtacctgttgttcccatgctagaaacaaaatgggtaatacgcccttgagtctgttgccaaatttcagggccagttgaagtaaaatgcgctcgagggttatcggggttattaaactgatctaataccttgccttcacctttacgctccatttcttgcgctaaatctctcgccccttccataccaatttcgcggctaaccaaaataagctcggcgccatacgcttgcatggatgcttgacgctctttactcatattttctggcattaataattttagtcgataaccttttactgccgctatcatcgctaaagcaatccctgtattaccactggttgcctcaattaatgtatcgccaggtttaatttcaccgcgtaattcagcttgctcaatcatcgataacgcggctctatctttcacagaacccgccggattattgccttcaagcttaacccatatttctgcatctaatccttgtgaaagtcgttgtaatttgaccaatggtgtattaccaataaattgttctaagcctgccacaataaatccctgatcatttatttgtttgtattaatgaagaaatcatatttaacttattaacgcaataaaattaacattttttaatagattttattctttttcgtgcaatagcctgtatagtcagttttactcaatagccaaaatacccatgcaaaaaaatctgcatgggcagtcattaactgtaataaaagaataatgctactttttaattaagctgtgtatgccagtgaaactgttgttaagggacgatcttgtgcatataaccgcgctttcgcaccgcccatatagtaaatatcacctttatggggtattgatgtcatatcattccataccgcgctaattggcgtatttccccattcaataggctgtaaaaccaattgccaatagtgtcctttaggagtcacttctattactttgacgggaagtttacataagctatcactatgcgggctaagtgagatttcccaaggacgtaaaaaaacatcaactttgccttgatagagcggcgtaaccgataaaggtaagtgatagccagcaatttgtaattgcgcaccattaatttcaccttggagatgattaacatctccgagaaattctaaaacaaagcgactttcaggcgtgtgccaaacttgttgcggtgtacccacttgttcgattttgccatttcccataataacgatgcgatcagcgacttccattgcttcttgttgatcatgggtgacaaaaacactggtaaatttaagctcactatgtaattcccgtagccaactgcgtaattcagttctcactttggcatctaacgcaccaaaaggctcatcgagtaataaaatttgcggctctacagccaatgctctcgctaaagctacgcgctgtttttgcccccctgaaagttgtgcaggataacgctgtgctaaatgaggcagttggatcatctctaataattgcgtgacttttttatcaatcgcggctttgttaggacgttcgcgacgtggtaatacgcttaagccaaaggcaatattttcaaataccgtcatatggcgaaacagtgcatagtgttggaaaacaaacccaactttgcgctcgcgggcatgtaaacgactgacatcttgccctgcaaaacagattttaccttccgtttgatgctcaagtcctgcaatgatacgtaatagagtagttttacctgagcctgatggccccaatagcgccatcatctcaccggaattgaccgttaaattcacgtcatgcaacacttcagtgcgatcaaaatattttgtgacatgattaatttcaatactcatattttgcccctgttttgcgttattgctgacgttctaaatgccattgcaacgcacttttaaccattaatgtaataattgccatcatggcaagtaatgctgctgccgtaaaagcccccacagtgttgtagtcttggtgcaaaagttcgacctgtaaaggcagtgaataggtttcaccacgaatagcccccgagacaacagagacggcaccaaattcccctatagcacgtgcatttgttaaaaccacaccgtagagcaatgcccaacgaatattaggtaatgtcactcgccaaaacattttccaactactggcacctaataacacagcagcttcatcctcttggcttccttggctcatcatcactgggacaagctctctcacgacaaaaggacaagtgacaaataccgtcactaataccataccgggccaagagaacattaactgaatatcgaattgttccaaccactgccctgcccaaccattgctaccataaaaaagtagatagagcagtcccgcaacgacaggggataccgcaaatgggatatcaatcagcgtcattaaccactgacgccccggaaaacgaaaacgcgtaacaagccatgccatactaataccaaacaacatatttatcggtacagtaattaaagcgataagtagcgtaagccaaacagcatgtaacatatcgctatctagcaagttgtcggtaaatatttctatgccttttgaaaacgcagtcataaagatccacgcaataggcaccactaaaaataaaatggataacacaacgcctgtaaggatcaatccccattttacccaatcaatttggcgacgataaagagagcgttgttgcgctatatccgacattagtgcccccttaatcgcttgccaaagcggctttgtaatccattaattgaaaacagtaagactaatgaaaccaataaaataacagaagcgaccgcgctggctgcaggataatcaaactcctgtaatcgaataaatatcatcaaagaaaccacttcggtctgccatgcaatattgccagcaataaaaataacagcaccaaattcccctaaactacgcgtaaaagagagcgcagtaccggctaataacgccggagacaattcaggtaacataactttacggaacgtttgccaacggtttgcccctaatgtttcagccgcttcttcatattcagggcctaactcttctaaaacaggttgcactgttctgaccacaaacggcaaactagtaaaagacatcgccacagcaataccaatccatgtattgatcaccttgatatcaaacttatctaacaccaagccataccatccttgtgtagaaaacaacgttgctaaggtcaatcccgctaccgctgtaggtaaggcaaaaggtaaatccattaatccatcaagaaattttctgccggggaaacgatagcgcgtaatgatccacgctaataacatgccaaaaatagcattaaaaatacttgcaacaccggctgacaacaaagtgactttatacgctgccacgatttgagggtgggttatcaccgcccaatattgtgcccaactcatttcagataactgcacaaccagcgcactcataggtagtaataagatcaaacaagtataaaaaagcgtactacctaaactaagcccaaatccgggtaatactcgcttgctggctgtggcaaacattattggcgtccttctaataataatttatctagcgtgccatctgtagcaaaatgcgttttcatcacttggttccaatcaccaaacacatcttcaatggtaaataatgaagtcgctggaaattgatctgcttttttcgccatcaccgctttatcatttacgcgatagttaaattgtgtgatgatctcctgcgctctcgggctatataaataatttaggtaagctttggcgaggttttctgttttattgcgttgcacatttttatcaatccatgccacaggaaactccgctaaaatatctacaggagggacaataacttgataatcatcttcaccatattgctggcgaatattatttacttcagactcaaaactaattaaaacatcaccaagtccacgttcaataaatgaggtcgttgccccccgtcccccggtatcaaataccgcaacatttttaagtaactttgtcatagcatcacgggtttgcgcttcatttccataagctttttcaaacgctccccatgcggctaaataggtataacgaccgttacctgatgtttttgggttagggaaaaccactttgacatcttcacgggtcaaatcttgccaagaagtgatatttttaggatttcctttacgaaccaaataggccattgtggaataataaggtgagctattattaggtagacgttgttgccaatcagcaggaataagcttgcctttatcatgcaaaatttgtacatccgtcacctggttataagtgacaacatccgcaggtaaaccttgtaatatggctaatgcttgtttagaagagccagcatgcgactgtttgatagtgactttgtcatcaggatgttgagcatcccattgggttttaaaatcactattaagctgtgtaaataactcgcgagcaatatcgtaagagctattaagtaattgagctgcatttgcataactactcgcaaccaaagacaatgcaacggttgcctgtaatgcaaaagttcggattgttttgttcttcattatagtacccatcagcgtaagtcttattctaatggttactctatcggctttatttataacagtgtagttagcttttgttatttgatataactaatagctattataaatggataaagagtgagattgcccaaataaataagcatcataatgatttaactgaaaataattcaacattgagatatcgagaaacaacctcgtcaaaataaaaacgccagcatagtaaatgatactggcgtggcaaaatagtagtgtaacgctaagacttacagagcggctaatacttcataagaaggagcgaaatagtagctacctgtcacaggtttactcatacgcagtaaatcatcgtatttaccatcaacttcaccaaacatactgagtaattgctgttcaatattatataaacggccacagtaggctaagaaatagaggccatgtttaccactagcagttccataaggtaagctatgacgcaaaatcgctaactcttcaccattttcttcaatagcaacacgggatacatgagaggtaatattgcgttctgattcatccaactcaatgctctcttttttagtacgaccaatcattttttcttgatctgattcactaaaacgcgcccatttttttaggttatgctcatagcgttgaaccaaaacatagctaccaccagcatcaataccttcattaattaaagcaacaccatagcgctcgtcaccaactggattttctgagccgtcaataaaaccactaagatcacgctcttcaatccagcggaaaccgtggatctcttcttctatttggagcacgttaccaaaagcagctattgcagcttgcgctaatgagaaattcacatcatgacgcatggattggatatggataagcatatcgcgctgagtcgcaggagctaaccctttgcctaatggacgaaatggctttaactctggcgcactattgttatctgataattttttccaaagatctgaaccaaaagctaccacggcacctaatgaagcatcaggatactgtttttgtaattcactaagggattgcataaattgttggcagccttgacgtagttgatcaatttcccccaccaccattgcttcaataaatagaccgaatttactatgtgcgactaaaataccgctttgtgcatgagacatattgcttccctaataaataataaaaaacatataaattaatgtggtttattatatccaacatttatttttaggctttgctatttaacaaatttttgttagcagaaaaggtaaatataaaattattttattaataacacttaaaaataacctatttttgccaaacaatttgtgttacctgccaatttgctaatgtttcatcgggtggcatcagaccatcagggccatcccattgcccagcaaaaacatagctcactgattttgcttgttctgattggcattgaatggttttttgtttatcgattttcggcccgttactgcacataccaaatgcttttttataaatatctttaaatggtgtacctattgtcgttccccacgctgttttcgcattaggatcagataccgtgattttatctactgtgcccttttcttggccataaaaagccacttgtactttttcatcttcaagtgcttgcacaataactataatattgccttgttgcatttccattccttgtcggtaatggaaacggctacccaactctttttcgatcgcttgctccgtcactgccgttgaagcagtgatattacctaatccatttgcagaaaccgttaacgtctcatttgagaaccaattcattggattaagtgcagaaaaagacattccccccatggatgaacagccacttaatagcaagacacttgtgcttaagcacaagggtaaccaaaatttaggcattataaatactccatttcactttttcgttataaattcaattgatgctaaggcaacaagtttttactcgcataaaactaaaataactgaatacttcagactagttacgaccataactcagccaagtttgttcccttaaatcgacaatatcagattttatccagtaaataagcaaggttaagttcttttttatcgaggcaacatcatgataggaaagaaagtacaaaaaaagaaaatcctctctattaaccgattaaaattatcttaacagtcaataaaagaggatttagcgaagaattaaagatcgaagtcctgatcgataattaggcgtttagtgtaagccgtattctcttgattttgatcttcatagagaagcttttcaaacatacaaatagtggcatcgttctcttcggggatcattaaagtaatttgtggacacccttttgcaatgagttttttctctagccgagagattagtgcattggcaattcctctaccgcgaaactcaggatgaacgcccaaatagtaaagcgagccacgatgaccatcatagcctcccattacactaccgactatttcgccagcaacctctgcgattaaaaagagatcgggggagtggttaatctttcgttcaatatcaatttcaggatcattttctggtgagatcaagtcgcaacgttcccaaagtgtaatgattgcctcaaaatcatcttgacggaatacacgtatttccattgttttgcctgttatctttcacaagttactaaatttattatcccttgtttactttatcaatcaacttcaaaatgagagcataggtcatatcgcgttccatttttaataaatatgataaaaactgtaggttattatgagtttacctgatattcatcgtgtgcaatcattttttttgtcgttgcaagatagtatttgccatgctattgaaaatatagaccaaaaagcaacctttcagcaagataattggcaaagagaagctggcggtggtggtcgtactcgaatgctcacccaaggtgctatttttgaacaagcgggtgttaatttttcccatgtttatggagatgccttacctgcatcagccacggctcatcgccctgaattaagcggtcgtcgttttcaagcaatgggcgtttcattagttattcaccctcttaatccctatattcctacttcacatgcaaatgttcgtttttttattgctgaaaaagagggagaagatcctgtatggtggtttggtggaggctttgacttaacgccttattatggatttgaagaagatgttatccattggcataaagttgctaaatctgtgtgtgatccctttagccaagattattatgctcgatataaaaaatggtgtgatgactatttttatttaaaacatcgtaacgagccgcgtggcgtcggtggtctattttttgatgacttaaacactcctgatttcgatcactgttttgaatttgtacaacatgtcgggcaaggctacctggatgcctacttgccgattgtcgaaaaacgcaaatctataccctggggagagcgtgaacgccaattccaactttatcgccgtggccgttatgtcgagtttaatttggtttgggatagaggcacgctatttggtttacaaagtggcggacgtactgaatccattttaatgtcaatgccaccattagtgcgctttgcatatgattatcgccctgaacctaatactcccgaagctaagctgtatactgattttttaattcacaaagagtgggtatagcagttactgacgcattaaaactaaagccatttatttattataattggctttagtttggtaaaaattactgctttattaattagtcattaaataaaaaggcgagtaatccagtcactttatttttattttcccacccctctcctctcatacaaatatcaaaatactgtttacgctctgcttcattggcatcataacgagaataggaatgataatttgaattaggaatagtaacttctttaccatctactgttatcgttgaagaagaaggatagctataatttggcgttgaactcaaataatgctcagggtagcgttgttttgcttcttgcatgcatagatttttagcgatatctaaaggtgtgggatttttcatatttacttgccatttttctggggtggcacagccagaaagtaaaaaaatagcaaaacccatagtcatttttttcaaagtaaaaaactcattaatacgaatagtaatcagttacaatttaactgttttttgaaaaaaatacttaatttttgcttaaattgtttcgatttcttttatgaaagtatgaagaattcatcaataattaataaaaaaactgagtccagtgaaacgaactcagtttttattctacatttaactggctatttaatttattttgatttctttaaatgagccattaaacgcttacgtttacgtatttgcgaagctgttaatttatttttcttatccgcataagggttttccccttctttaaattgaatacggataggcgttcccatcacttgtagtgtgcgacggaaataattcattaaatagcgtttatagctatcaggtaaatcagacacttggttaccatgaataaccacgacaggtggattatatcccccagcatgggcatatttcatttttacacggcgtccacgaataagagggggttggtgatcatcctctgccatcttcattatgcgcgtcaacattgatgtaccaacacgacgtgtcgcgcaagtataggcttcttgaatcgactcaaacagattaccaacaccactaccatgtaatgccgagataaaatgaacgcgggcaaaatcaacaaaacctaatttgagatcaagcatatctttaacttgttcgcgatcttcttgggtcataccatcccatttattgacagcaataactaaagagcgtccagaattaagaatataacctaataaagagaggtcttgatctgaaatcccctcacgagcatcaataacaagtagtgcaacattacaatcttcaatcgcttgtaatgttttgatcactgagaatttttctaccgtttcttttacttttccgcgtttacgaacgccagcggtatcaataaggatatactccttaccatcacgctccatcggtatgtaaatactatcacgggtagtgcctggcatatcgtaaactacaacacgctcttcacctaacatacggttagtcagagttgatttacctacattagggcggcctacaatagctaatttaacaggaagtgttgtcggatcgaaatcatcctcttcttcctcttcttcttgctctttctgctctgcttctaaagcagcccaataagcggcattctcttcttcttctgttaattctttctcttcttcgacgaatttacccacaataggtaacaacgcttgctcaatcagttgagaaacaccacgaccatgtgaggcagcaatagggaatatttcccctaatcctaaagagtagaaatcagccaaggcggtatcaatatcgataccatctgttttattcgccactaaataggtttttttctcaacaccacgcaagtgtttagcaataccttggtcggcaggcattaatcctgctcgcgcatcgactaaaaatagcacaatatcggcttcttgaatggcttgcagtgattgtgatgccatatgggtttctaccccctcttctgcaccatcaataccaccagtatcaatgataataaattcttcaccgtctaattctgcacgaccatatttacggtcacgggtaagtccaggaaaatccgcaactaatgcgtctcttgtgcgtgtcagtcggttaaataatgtggattttcccacattagggcgccctactaaggcaataacgggtatcattttttgatgcctcataaaaatacaatcataaatctgatggtattttacatgtaaatactaaaaagacgaaacggctcctttaaaggagccgtaaaataattatatttgtcagtgcttaattaccgacgatatagataaagtttaccgtcacgtgcttggatcatcagtttatcttgaacagcctgtggacggcttaataaacctgagctattgactttattttgagcaataaatttgcctgtactggtatcaatccaatggagatagccttctgcatctcccaccactaaataaccatcaacgatagccggggcggttaaattacggtgcagtagatcttcttgtgtccataatgtcacaccatcagatttgcgcacagctaaaactcggtcattttggtcgacaaggtatagattgtcacccaaaagtaccatgtcattaactgaacctaaatcacgtttccagatgatctgccctgaacgcatatctagactgactaaattaccgttgtaagccatggcataaacagtattttcatcaataattggcgtaatatcgacatcatttaagcggctgatctcagtagagcctttcacttgtgaaatattttgctgccaaactaattgcccttgagataacaccaccgcactaacacggccattatcagcgcccacaatcgctgcaccataagcaacagccggtgctgattcaccacgtacggataatgatggtgtatctaagttgaccgtccatgatacttcacctgtcagcaaatcaagcccttgcaacataccgttactggtatgaataagcactaaaccatcactaacaacaggtttggaaatcgcttctccggcaacatctgtttcccaatcaatagagccatcatctgtatttaaagcatacacttttgctttttctgtgccgacaaaaacacgagtaccagagacggttaaaccaccggaaagtaatgctgattcattagaggagaagaaaccttttttagttgagagatcttgagaccaaatctctttacccgtttctaattctaatgctttaactaccccatggcgatcagcgacatacacaactgaaccatcccatgctggtgacaagtgggaatagtattttccaataccattgccaaccgatttgtcccacaccacataaggggtaaattggctctgcacctcaggcaatggagacattgtcacattatcctgctcactagaacacccagctaataatgctgatgctagtagaccgatcaggagagttttacgcagttgcatgtctgaagatccctttaattggataaattattgagtttaagttcaaccaatgagcgaatagcgcctgcattttcatcattcaatgcattacgataagcggcggctgcacctgcgttatcgccttttttcgctaatacatcaccacggatataatttttcattccatcccatgctttacttttcacttgctctaatgaaattaacgcagcatcagttttatctaatgccagttgcacacgagctaagcgaaggttaagcatatctgcaaatgcttcattctttaccatagatattgctttagtcaggtgagtttcacctttggctaaatcgttggcatcaattgctaattgagctaactctaaagaggctaaagcaccataaatatcgttagtttcagaaacaaatttttcggctaatgcgatattttcaggcgttggtttcgttaatgcttcatttattgttgcaaattcacccgcactttcttgtagacggttggcttgatgtgattgccaatatttccaaccccaaattccacccacgccaatgacaatagcgagaatgatcgttaaaccataattttttaaaaactgtttaattgcatcaacttgttcgttttcggtgctataaacttccacaagtctctccttaacctaataacagcgtcaattgttgggccagttcgctacgcgatacaatggtctgttcacctgaacgtaaatctttcacggctactgtgccagcgttaatttcatcttcacctaaaattaacgcgattttagcaccatgtttatcagcacgtcctaattgctttttaaaattgcctttaccgtgattggtcattaagcgcaatgtaggtaattgatcacggatttcttctgccagcattaatgctgcactttggctattatcaccaaaagacgcaaggtaaacatcagcgacatgagtatcagcaacaaactcaggattaaccgcttgaactaataagatcatgcgctccatccccatggcaaaaccgaccgcaggcgttgggtgtccacctaattgtttcactaatccatcatagcgaccacccgcacataccgttccttgtgaacctaatgcactggttacccattcaaaaacagtacggttataataatctaagcctcggactaaacgctgattaacacgataagtaatacctacagcatcaagtaatgcacataaaccatcaaagtgttctcttgattcgtcatcaagataatcgaaaagttcaggcgcatcattcaataaagtctgaatttcaggatttttagagtctaaaacacgtaatgggttagaatacatacgacgtttgcaatcttcatctaattgatcaacgtgttgctctaaaaatgcgactaatgcttcacggtattttgcccgcgcttcgagtgaaccaatagagttcagttctaaagtcacgtgctctgcaatacctaaagccttccaccagcgtgccgttaacataatcagttcagcatcaatatcaggcccttgtaggccaaatacttctgcacctaattggtgaaattggcgataacgacctttttgagggcgttcataacggaacattggccctaaataccataagcgttgctcttggttataaagtaaaccatgttcaattcctgcgcggacacaacctgcggtattttcaggacgtaaggttaagctttgtgcgtcttcacctcgatcggtaaaagtatacatttctttttcaacaacatcggtcacttcaccaattgctcgctgaaatagaggggtatgctctacgataggtgttctaatttcactaaaaccataaccggctaaaatttgttttagcgtattttcgattttctgccatacccgcgtatcagcaggcaggtagtcattcataccacgaatggcttggattttttgtgccactttttttctctaatagttattaattgatcaataaactgattatagaagcgaaaacaatcagtattcaatgtgaaatcaatagtaatacagactcattagttaatgagcctgttaattgcgtgttatttatccaattgatttatattaattcggaggttgccgtcaagcattgccgcttttgtacggattttcgcctctaataaatcaatcatattactattatcaagacgctctttttgtcttacaccgtcttcataaaaaccactgcgtgttttagctccggttacacctagtgtagaaacctccgcttcaccaggaccattaaccacacagccaataatagaaacatccattggtgtaatgatatcttcaagacgttgttctaattcattaactgtaccaataacatcaaactcttgacgagagcatgttggacaagcaataaaattgataccacgagagcgaatacgtaatgattttaagatatcaaagccaacttttacttcttcaaccggatctgcggctaaagagatacgtaaagtatcaccaataccttctgatagaaggatcccaaggccaatagctgatttcactgatccggctcttgcaccaccagcttcggtgatccctaaatgtaaaggctgatcaattttcttcgctaataaacgataagaatcaacagcaaggaaaacgtcagaagcttttacactgactttaaactgatcaaagttcaatttatctaagatatcaacgtggcgcatagccgattcaactagcgcttcaggggttggctcaccatacttttcttgaatatctttctctagtgaccccccattcacaccaatacgaatgggaatattacgatcccgggcacaatcgacaacttgacgaatacgctcttcattaccaatattaccaggattaatacgtaaacaatcgacaccatattcagcaactttaagtgcaatacgataatcaaaatgaatatcagcgaccaaaggtactttcacttgttgcttaattagtttgaatgcttcagccgcatccatagttggtacagaaacacgtacaatatccaccccaacacgttccagagacttaatctggtttacagtcgcttcaacgtctgttgttcgtgtgttcgtcatcgactgtaccgcgataggagccccatcgccaataggtacattaccaacataaattcgcgtcgatttacgacgaataataggtgattctttatgcattgattaattctcccatgcttccatgcttgctcaaatgtatagtcagattaagcgctcggtactgttatttttgctatttttccagtaaaacggcttaagtcaacagcttcaccattaaactgtaaacgagtaacagaaggtgcgcctatttttagtttataaggttgctcaccattaaattccaaacggtcaccggctttcttaataccattaaataaaactttattttgagcattacgaatttctaaccagcattcaccatcaaacatcaagaccagttgattttccacaattggtgcgggtgttgaattgccttcagcagaatcagcacgagaagtcgttgatgtggttaatggtgacaccggtaatggaactgttttaacttctgcctcaggtgtggcgtctgttactgatggctcggcaaccttattagcctgattatctactaatggagaagcaggcacttgtacattttcaccctcagatgatgggctattattatctaaggttgataaaggagattctatcgtattggtgttttcttgcggactattttgtcctatgtcttgcgaagccatagagactaattcttgttgatcggcttgatgcccctgccaccaccataaaccgactaaagctatcattgctattacaataacccaagtcaatttcatcaaccagccttcacgctttttatgacgtttacccaatgagtaattttgtgttgttgttactttgacttgttttattggggcttgttgatcaattagacctagaattgcgctttcaggaacaccgacaagttttgcataagagcgcatataaccacgtaaaaatgtcggtgcaataccagaagagatagtatcagcttcaatttcacatactgttgttaacttcaaacaaagtcgatcagcaacagtctgctgagttagccccgctttttcacgtgcctgacgtaaaagttgacccgctgttaatttcacttcttcggttttgttttcagtattcattagcaatctaggcactgtggctattggatgtttaacattgatgaacacgagaaaatacagtttttaacgtcctcatcgcgaatttggtgatttttggtattcagcatgctgacaaaccaaataatctgacggtatatcctcaattaacacattattgttgtttaataaattttgttcacaaaggaaattaccataaaaccttaatacattaacatttactggcttcgacttcatcgctaatttgtaataatctagcgcctgaataggatttcccaataactgggatgttaatgccattcctaaatttgcttcaggatgctcaggcatcactgacagcactttttgaaaatgatattgggctatctgatattgttgctcagccagataagcttcccctaattgaagacgaagaggcactgcaacatgttttttatttgctgttgattggcagcctattgtcaataacaccaagcagatagcaacaacctttgatgacatccttatcatcgttatcttccttaaattaatccattcttgcaactctctactttgttttaaaaacacagcacaaagcgagagttacccacctctatcagactgcttttactgaaattggttcaccttgcagacgttttttcagagtacgcttagttcggtcaatcacatcaccagcaagttgaccacaggcagcgtcaatatcatcaccacgagttttacgtacaatagtggtgaaaccatattccattaacactttagagaaacgatcaatgcgactattagaactacgtccataaggtgcgcctgggaacgggttccatggaattaagttgattttacaaggtgtatcttttaagcactctgctaattgatgtgcttgttcagtgctgtcattaatatgatcaagcatgacatactcaacagtaactcgaccttggtttgcattagatttagcaatataacgacgcacgccatcaagaaacatttcaatattatatttcttgttaataggaacaatttcatcacgaatatcatctgttggtgcatgcaatgaaatcgctaaagcaacatcaaccgcatcagctaatttatctaatgcaggtacgacaccggatgtagacacggtgactcgacgtttagataaaccaaagccaaagtcatccatcataatttcaagagccggaataacattgttaaggttaagtaatggttcacccattcccatcataacaacattagtgattggacgacggcctgtctcttttaaagcaccaataattttagcagcacgccacacttggccaataatttcagaaactttaaggttacggttaaaaccttgttgtgccgttgaacagaatttacactctaacgcgcaacccacttgtgacgaaacacataacgtcgcacgatcatcttcaggaatatagactgtttcaacttgttgagagcctactttaatcgcccacttaatagtgccatccgcagagcgttgttcttcagacacttcaggtgccttgatttcggcaatctcttttaacttcgcacgcagcactttgttgatatctgtcatctgatcaaaatcatcatagcaataatgatatatccatttcatgatttgatcagcgcggaaaggcttttcgcccatagagacaaaaagctcacgcatctgtttacgatttaaatctaacagattgatttttgttttttgattcacagtattttctttagaaacagcgacagaagcgcttggcgctggagtggtagattgggtcatgacattgcctcgttgttacactatgcggcctacgttaataaaatctattaacgggatacttattaattaataaaaagacgccccattaaagattaacagggcgtcgcattgtacattttttcgtatacagatgctaataaattagcgtgggcaaatttcgttttcagtaaagaaataagcaatttcacgcgcagctgaagcttctgaatctgaaccatgcactgcattttctgtaaagctatccgcgtaatcagcacgtaaagtacccgctaaagcgttatcaggattagttgcacccattaagtcacgatgacgttggatagcattttcgccttctaatacttgtaccatgatagggccagaagtcataaactcaactaaaccatcaaagaaaggacggcctttatgctcttcataaaaaccttctgcttgttcacgagttaaatgcaacatttttgctgctacgatgctgaaacccgcactttcaaagcggttatagattgcaccaataacattttttttcactgcgtttggtttgataatagaaaaagtgcgctgaatagccatgtattacctcaaaatattgtattaataacaacttatgttgcctgtttttatcgcagatcatggaaaaacagctcaaaaccgtatcccctgcaaaaataagggattgattatagggggataacaataaattgcacagatgaaatcccgcttttttttaaaaaactgtggcaaaaaagttataatttatcgatttaatcacattttttaccttcatttgattaaactctgcacttatttaacgaaaactaaaattcaccatatccgtttgaccgctaagatcaagcaccgaaagttggtatttgccacgtttttctaataaataagagaacgttgccccattttcagttttaccgatttgttcaccatttaaaaaccaccactgcataccacttcccccttgtgtagaaaccgttatttcaagctgagtttcaccaggcaatggacgcaataaatccccttttcttatcccagagatatacaaggggatcatatcttctttaatcggtggacatgttaatgaaattggtggtaatcgttttgctctacgctctttttcaggcaaccaagcatctaatgctatcggccatagagcaatatcctttaattgagcaccaggacaattaggccctgtacgttttccttctttatctatccatactttttcattgatgcctaaaatgccctcttggctttcattcaatagtgttgggggaatagtattatcaaggatccagcttcgtcgactgactcgacagttgctatcttctttaggcaaagcttttcccgttggccaacaaatagctgcggctgagacactatttggcctaggatcaacaggaggccgctgtttattttgataaaaataactcgtcaataaattattaacttgattcattatcggtacagcggttgcaaatccaaactgccccgcaacaggtgtgccatcaggtctccccacccaaacaccaatggtataacgcgcattaacgcctatcgaccatgcatcacgataaccataacttgtgcctgttttccaagccaaaggaacaaccgctgaaatagcactatcaggacgaggccgtgcctctcctgctaaaattcgccgaatgatccacgcagcaccgggtgacattaacatacgttcattgatggtttgctctggcgtaaaacgtaacggcgctgtttttccatgccttgcaagcgcactaaaagtcgccactaattgatccattcgtgttgctgttcctcctaaaataagcgctaaattaggttcagagccataaggaaaacgcatttcaaggtgattatgtcgcaacttagctgcaaatttttttgcgccataagcttctattaattgaacggcaggtaaatttaatgaacgactaagggcttcactcgcactcacggcaccgttaaatccagtatcaaaattaccaggacggtaatcttcaaaacggcgcggaacatcttgtaatagtgattctgcatggatcaatccttcatccaaagcaagaccataaataaaaggctttaaggttgatcccggcgaacgccatgcacttatcatatcaacatgcccaaagcgttgattatcattaaagtctgccgatccaacatagcctttaacactcatatccgtgtgatcgaccacaagtattgccagagaagttttatcggctagctgatatttccactgtttggctagctcttctagttgtcgctgaagattaatatcaatcgtggttgtgatcaccggcgctttttgctcgttatacatacgccgagccaataacggcgcgagttggggcgtttgtcttggtgcaagtagcacttgctcttgctttatttcagccactttctctttgggccaaatttgatattccgctaatctatctaatactttatcccgtgcagcttgagcacgctctggataccggtctggccttaaacgactgggtgcttgaggtaataccgccattaatgttgcttcacctgctgataaatcagcgggagatttacctaaataggcccaacttgcagcgccaatcccttctaaagtgccaccaaaaggtgcacggttaagataaatttctaaaatctcatctttcgagtaataccattcaagctgtaatgtccgccataattgttttaattttccccctaaagtccgtgagtgggggtcaatcaaacgcgcaacttgcattgaaagcgtactacctccagaaacaatttttcccgagcttaagtcttgccatgcggcacgtaaaatagctatagggttaacaccgaggtgctgataaaaccagcgatcttcataagctatcaaggcctgcaaatattcaggggaaacatcagaaagggtaacgtgataacgccatattccttctttatcagcaaaacgccaaagtggtgttccatcttcagccgttactatggtggcgatttgaggctcgggatctggcagtggccagatcttatctgctatccatagcaataatggtgttactaatagaaaaataacgctcgcggcgattaaccgcttatatcctagtttcattcaatcactcaaaggaaaaagccctttccgaagaaagggctgtctagcttaaggcacaacatcaattttattttttgttgcccctacggcacgccaataaggcacatacattgactcaacttgcggtggcggtacttgataactccccggagttaccgctcttgctaagtaaagtaatgtcgtaggacgatatttatcaaccgctattgcggcaacaaaacgatcatcacgatattcaagatgtttaatattggcttgtcccatatcatcaataaactcctgcaaatcagcagcgctatcgcttaagcttgcgctgcttgatgctaagttttgattttcaatttcaagccccgcaggtaatagatcaaccactaaggcatcaggtacatctctattagctgaaacctctaattttaccaccagcatttcaccactttgtaagcgattaggatcgactcgattgccttttagatcgtaataactacgattgatcttcaatacattgctataaggcgctggggcaacttttggatatccgacaacattcattcgagagtaaatggttgtaccaccttggttgtttagctctaaaccttcttgcaattgtgttgctgtcaatgcttcattaactgcgcgatcactactcattgctggcacttgacgattaatggttacttcccaaggcttctctgccatatcaataaagaaacgaccagcaaggtatagtgagttactctcttgtgtagagaaccattcacgccctgttaagttatcagataatgtaataacactggcatcacgagtttgagtttccaaattgttttcactgagtagcgcaataatcaacgcttggtcacgaatagtactgccgtaatcacctaaaccgtaattatatttacgtggcatggtgacaccttcagcaattaggctttcagcacgagagttatctcccatcaatttcaaagcaacacctaactgcacaagcgctaaaccactacccgcttgattacgttctagatataaacggcgcaattctcccaaaggggctttttgctgattagccagaactaaagccgcatatgctcttgctgagaatcgagccgcatcttggttaaccacatactcttcattaacaatatttttatcttgtaaataacgtagtagacgatcatttgcccgttttaatgcctcagtaggaacttcataaccttgttgagacgctctaaataagaaatctgttgcatacgccgttaaccaaaactcttcacgcccaccttgagcccacaaggcaaatcctccttcggatttttgcattgttaagatatgagcaatccctttttctatggcttcttttctttgcatatctgtttgtgttttgatccccaattgtttcaactctttctctgttgaatacaaggatggatataatccactaacagtttgctcaagacatccataaggatatgcaaataactctctaacataacgcgctacctgtaacggagggcgactagtaagtaataattccccctcaagcgttgagcgattaaattgatttaatgcttcgtttggtaggcgccaagactcaccatctgctaatgtattggcgtaatgtattgtctcagcaggatacgcagggcgtacacctattttccaagtattttgataaggttttatctcttcattaggtactttaataccataaatagacagggaaaattctccttggccaaatccatgttttgccgtaatagggatttgaacttgagttcgttcacctttcgataatgaaacggttttactgtcgacacccgctaaatcaactaatcctgatgccgtataatttaacgtaatagattgtggtgcatccgttaagttagttaaatctaatgacagtaacgcatcatctcccccagccataaagcgtggtaatgagagttgagtaactaatggcgcggcaacaacaactttaccttcttggctaccaaatttatccgcagtccatgcttgagccataaggcggacttcaccattaaactcaggtataggtaaagaaacctcaccttcaccttgtgcatttaattttacaggtgttgcttgttgagcaataatttgcacatctgttaatggctttttaccaccacgagataatgcgctttcttcgcttccatcaccaccaaaacgtaggttggctaaacgcccttcaccttcaattaactgaccataaacatcgtattgatcaacgctataacgcttacgaccaaagaaagcttcgtacggatcaggcgttttatagtcggtaatatttaagacacctgtatcaactgcagacactaatacattgatgttttccggcaatggctggcctgcaacgggcttagctttaatccgaatttttagatcttgatttggacgaattttttcaggtgcatccagtgcaatatctatacggcgattgttatcttgtagtggtaaatgcaaaatacctactgcacgttttaccgtcgcttgtttggatgtatcccccggtcttaccaccaccgaagtcaaatataaatcgtgtcttgcccactctttattaataggtacttcaacatcaagccctttttcaggtacatcaatctcttgccaccatagtggcccatcactcgattctaataacacatagcctttgccaggatgaggggctgcaatattgagtttgactttttcacccggtaagtaactctctttatctaattttaatttaacttgatcaggtcttactgccccggttccgccagtattatccatccaagaatagcccgcccaaaaacgtaagctactgacaagttctgttttaggatcgaccacttctatacgataagagccccattcaacagggaaagccacttttgcggtaccatctttagctattttgatagtctgctcatccatttgcagatctttttgattgtagccagactcccaaccatttgaattagaccaacgccaataataatcataacgttcgtaaataaatcttacttttaggtcatcagcaggtaattttttaccctcttgatcggtataaacgatttcaaactccgccattgagttttcatcaacactatagcctgatttatatttatcattacggtagtcatacacctcttttttagcaaaaacagggcgaattcccgcaagatgtgtcgctggccataccgcttgttgataacggcgagtaacaggacgccctcctgcttcaagtaagcttgcttgtaagataatattaatcggtgatttcacttcagcataacggtctttatcaaccgttaatgccccttcaccatccgtatcaagagtaagttcaaattcatctaataaacgacttaaattttcatcttttacggcaccaaattcataacccggcagttgactgacggcttctcgcgaagcttttaagaaaacctgcccttgcaagcgattatctgctgccggtgcaccataaagataacgacctttaatatcaaaataagcattattaccactgagtaaaatgccttttttaccggtgatctctaatgccatacgctcaggcataaaatcttcaacttggaattggtagaagcgtggagtgccatcgcctaaatcaaaacgtaatttccgaatacctgtactctcattttcagggatcatcagtttcaactgataaaaaccattttcaggttgccaaacaaaactacgggaaacctgaccatccgtttttaataagtcaactttaacaggttgctctttaatcgggtttccatcaccatctcgcaataaaccattaacgattaaggtttcgccggggcggtacagatcgcgtggaccaaagacaaaaaattgtttgctataaccttgtggcccgccgatatcaaactcggataaatcaagggctggtttacgcaaatcaatcatactggtttgcccattacgaatagcgagtaataaacgtgctttatcactcttttctaatgtggcatgcccttgattatcagtttttgttttagatattaaattacctttttcatccaaaagacgaatttcaatattgtctaatgctgcgccatttttcagggattgagtaaaaatatctagcgtattaaggtagctatgtactgataaaccgatatcactaaaagtaaataccgttgccggcatggtataggagtatttacctgcctgctgcattacggcgatatagacgccctcttttttcagggcttcaatagatttgagtggtaataagacattttcacgggtgtttttttctgtatcaagttcaaagcgcccgctatacaccaaatccgcttgtgacagaaaatcgtctgattcccaatagttaatattagagcggctttcccattgagttaaaaattgtgtcaaccgatcatctttaactcggaaaaagttaacatcgacttgttcgacatttaatgcgctaattggcaaaccttccgttgcttctaacggtaataatgagcctttactggtaaagccgaccgatggaaaaatctcttctgtagtaaatttttggctaaatggctctactaatttacgttcgttaattcctttaatttgagcatcaatagtcaggtttaactctgttgaaggtggcaaatggcggaatcgtaactccatcagattatcagatagctcccaagccccttctaatttaccttttttagtatcaacaagacggataacatcatcaaatttctgatcaggatcgagtggtactgaaaaagtcactaccatcgtacttgcgccatcgcgttgtaattcagaggcatctagtacagtcacctctttacctgcataacgacgagcaagttcattgcgcacttcttggctagttaatgcagtttgattattcgttttggttgtaactgcggttttatcaccaagttgtgttgtcgtttgttgcgatgtgcttttttgttccgcaacttgtgttggttgtgagttatcactcgtcgaagattgctcatcttctgttttgttatcatcacagcctgttaaagctaatgctgaagccagtaccactgcaagtgtacaccaacggtaccctcttttttccgtgtactgtctaaattgatctcgattcatatccatttcctttaattcaacccctgaattatatgatgttttatgcaggctacaataatacctaactcattaagtaacctaattatttaatactacagccttatttgggctttactaattatttatttgtgcgtttttaagcaaagtaatagtaaaacaaagagttacatataaatgcaaaccatttgctattttaatcattttcttattatagggtaaaaaaaagcgatatctgatgagatatcgcctaaactgcaaaaaattaggttaggtattcaaattaacgattggaatacccttacgaagaaagccccctaatttgcgttgataaaaaggggttacatggtgagtcataaaatgacttacaccttgctcatctttattcacaaaacagaaatccagagattgtccttcttctaggtgctcaaaagcggcttcagcagcttgtgggagtatctgagcaataatattttcttctccagtgatttctagcccaatcaaataaaatgactcatcatcaccttgctccaaagcattaacaataaatgcacgacgaataggcttatgttgaccaaaaaattcgctcaatgcttgtgttaatttttcaggctgtggctcaagcacactcagttgtagagaagaaccttcaacagcaacaatttcttgtacttcaaattgttcagatacatccattacaaactccaaatcacataatgtttattattttgcttttgttaataataaattagcgatagaacgaacaccatatcctgttgccccagcagcccattgctctacagatgattttctgtaagttgctgaacagtcgatatgtacccagccttttttataatctttcacaaagtgagaaaggaaagcggctgctgtacttgcgcctgcggtatgtgaaggtgcggcaatattattgagatcagcaaaacttgatggtaactggctacgatggaaatcagctaatggtaagcgccagaacagttcattttcttgatctgcacttgctaataattcattcgctaatttatcatcaaaacttaatacagagtgataatcattacctacggccactttagctgcacctgtcaatgttgccgcatcgataatcaattcaggggcaaagttgctagcatcaattaaaccatctgctaaaactaaacgaccttctgcatccgtattcatgatttcaacggatttaccattacgataacggataatgtctcctaacttaaaggcattaccgctaaccatattatcagcaatacatagcaatagttttacgcgtttatttaaacctcgtgtaatagctaaagccaaagcaccagctaaggttgcagcaccgcccatatccgctttcatagaattcatggaagaagaaggtttgatgctatatccgcctgaatcaaaggtgatccctttaccaacaaggcaggcaaagataggggcttcggcatctttagttggattaaaatctaatgctaaatagacgggatcacgtgaagagcctcgacctacagtataaattcccgcatagttctgatctctcagatcagcccctttggtgattttatagctgatatcttctttatctaaaccacaaaacagatcaacagtacgctgtgccagttgttctggccctaactcttctgctggggtatttattgtgtcacgcacccaatcaacaatgcggatacgcgactctaattcttttttgtccgcttcacttaattgtggccattcgattgaacgtgcgcctttaggtgctctaaaacctaaccaaaacgcccaactacgttctaaatcccagccgtcaccaactagagcaacattacgaataccttgaccatcaattttgcgtccaccacgctgaatggcccctaagcggttttcttccgttaagtgaacggtcatgccagtttcgttagtgctaattagtgctttttctccccaacatgctgctgcaggttcattagacagcatgataggcataatttgtttattcatttattatctcacttattattactgatggcagttaacctattcagactaccagatatttaccttttagcgtgatcaatttactgcaaaaaatcagtcacgaccattctcattaaagccttttagctaattgcatgttactttacgagcaatatcccataaacacacgctggttactcagtcttttgaggtatttattcctcttttaaggttaaatcatactgagcaataaaaacaaaaagactggcaattaaccagtctttcgcattaatcatttactcgattattcaaattcatcaagccaaactaataaaattgcttcaagaattttttcattcgatttttgtggatcatcatcaaaatcgtctaattggcaaatccactgatgcatatcggtaaaacgaacggtttttggatctgtatcggggtagagatcataaagcgcttcccctatttcacgtgtatcactccatttcattttaaactcctaaaatcagtgttctctcgcatggttgatagaatatttaggtatttcaacgactaaatcttcatcagttaccttcgcttggcaacttaaacgactttctggctctaatccccacgctttatctaacatatcgtcttccagctctgtactttcatcaagagagtcaaagccttcacgaacgatacagtgacaagtggtacacgcacacgacatttcacacgcatgttcaatctcaatgccattacgtaatgcaacatcaagaatagactcaccttcagtggcatcaacaacagcaccttccgggcaaagtgtgctatggggtaaaaatacaattttaggcatagttatatctcatccacagaatgacctgccaacgcttgacgaatggaagtatccatacgacgcgcagcaaattcctgagtttgcttatccagttgtttaatggcgttttcaatggcaacaggatctgttccctcaacgctttctattaaagtatctacaacattatcgatagccgttttctcatcttcagttaagagatgagcatcttcttgtaatgctgcggttaaactttctaacacgcgagcggcttcgactttttgctcggcaagacgacgagcttgtaaatcttctttggcattttccattgaagattggatcatattagcgatttctgtatcactaagaccataagaaggttttacctgtactgaggcttcaacaccagtggatttttccatcgcactaacgcttaataaaccatcagcatccacttggaaggtaacacgtatatgtgctccccccgccgccattggcggaataccccgcaaagtaaaacgggctaatgagcgacaatcactcaccatttcacgttcaccctgtaccacatgaacactcatggcagtttgaccatctttaaaagtggtaaattcttgtgctctcgcaacagggatagtggtatttcgagggatcactttttcaaccagcccgcccatggtttctaaacctaatgaaagcggaataacatccaacaagagcatttcgctatcaggtttattacccaccagaatatctgcttgaatagaggcaccaatagcaacaactttatcagggtcaatcgaagttaatggttcacgtttaaaataatcgcctaccatttggcgcaccagcggcacgcgagttgatccgcccaccataaccacttcgagcacttcatccacgtcaacatcagcatcttttaatgctcgacgaacagataacaacgtacgtttaactaaaggttgaattaataattcaaattcagcgcgggtaatttcccctttccaaccattgatattgatatcagccacatcattatcacttaaagcgattttagtttctgaggcaatatcaagtaattgacgttgtaaaataacatcattttgatagccaaatcccgcacgctctctgatccagtcggctaacatcatatcaaagtcatcaccgcctaacgcagtatcaccaccagttgctaagacttcaaacacccctttagttaaacgtaagacagagatatcaaaagttccgccccctaagtcgtaaacgacaatagtgccttcttttccggaatctaatccataagcaatcgcggcagcagtaggttcatttaataaacgtaatacatgtaaacctgcacgacgtgctgcttctttagtgccttgacgctgtgcatcatcaaaataagcaggtacagtgacaaccacaccatcaagttcaccacctaatgattgtattgcacgctctgctaaggcttttaaaatatccgcagaaacttgaataggatcgacaatgccagcaggtgttttaattaatggcagtccactatcattgtcatgaaaatggtaagggaggttaggataacgactggttatatcatttagcgagcgccccagcattcgttttattgagctgatagtattggcgggatctttttcggcttcttgtttcgcctgccagccaacattaatattatcaacttgatactgcacaacagatggcaataaatagcgaccttcactatctgaaagcgcttcggcttgcccactacgtacagtggcaacaagtgagtgtgttgttcctaagtcaatacccgcagctaatcgacgctgatgtggcgcaggtgtttgtcctggctcgctaatttgtaataatgacataacaattttccttaaaaaccatcaaacaagcgttcttcaagatgctcgacttgctcttttaatttcgcgagaaaacgtaattttctcacattgtctgcggcaatgtcccaagtctgactgtccagtgttttcaccatttcatcatagcgtacagtgtacattttctctaagcgcgcagaaaaatcagccagtaaattttcagcatcagtactatgctctatatcatccagctcttcacgaagcgtaagctgctccataagaaaagccgtatcgtgcatcgtttgttgttcattagcaatatcgatgccctgtaaagagagcatatattcagctcttgaaagtggattttttaaggtttgataagcctgattgatagtcgaagcaaacgaaattgcttgtacttgctctttgtcagatttacccgcaaaacgatcggggtgatattgacgttgcatctcttgataacgagaagcaagctgttgtttatcaatatcaaaacgattaggcatgcctaatagggtgaaatagtccatacttctgctcttggattaattgatattaataccgtgtataaatattgattacacggtaaagctttctccacaaccacattcgttagccacgtttgggttgttaaacttaaagccctcgtttaatccttctttaacgaaatcaagctctgttccatctaaatagaccatgcttttaccgtcaataataactttcacacctttatcttcaaaaacggtatcttcgtcattgatgacatcagcaaactcaagaacataagccatcccagaacagcctgatgttcttacgcctaaacgcaaaccttcgcctttgccacgattagcaagaaaagagcgaacacggttagcagcggcttctgtaagggaaattgacatggcacacctcactcataaagaacgaaagcggacactgaaacataaccttcagcatccgccaatattttatttttttattataacaggcaattatttgccttggcgtttgcttttatagtctgcaatcgcggcttttattgcatcttcagccagaattgaacagtgaattttcactggtggtaattctaactcttcagcaattgcggtatttttaatcgcttctgcttcatctaaggttttacctttcatccattcggtaaccaaagagcttgatgcaatcgctgagccacaaccataagttttaaaacgtgcatcttcaattacaccgttatcatcaactttgatttgtagcttcatgacgtcaccacaagctggtgcgcctaccataccgctccctactgtagggtcgttgttatcaaatgaacccacattacgaggattttcataatgatcaattactttatcgctataagccatgatttaactcctgaaaacgtctgattaatggtgagaccattcgatactgttgatatcaacgccttgtttatgcatttcccaaagtggagaaagatcacgtaagcgaccaattgcactgtgaatttgttcaattgcataatcgatttcttcttcagtggtgaaacgacctaaagagaaacgaatagaactatgtgctaattcatcagttaatcctaaagcacgtagtacataagaaggctctaaacttgctgatgtacaggctgaacctgaagatacagcaagatctttcagtgccatcattaatgattcaccttcaacatagttgaagctgacattaagaatatttggcgctgtatgttctaaagaaccattgatatacacttcttcaatatctttgatgccattccataaacgtaaacgtaattcatttaaacgtttagtttcatcagccatttcttctttcaatatacggtaagcttcacccatacccacaatttggtgaacggctaatgtacctgaacgcataccacgctcatgcccaccaccatgcatttgtgcctctaagcgaatgcgtggtttacggcgaacataaagcgcaccaatacccataggtccgtaaactttatgtgcagaaagagaaagtaaatcgacttttaatttggagagatcgattggtaatttaccgacgctttgcgttgcgtcaacgtggtaaataatgcctttgctacggcataattcaccaatagcagcaatatcttgcaccacaccaatttcattattcacgtgcatgatagaaactaaaatagtgtcatcacgcatagcggcttcgagttctttcaaatcaattaagccatcgctttttggtgctaagtaggtcacttcaaaaccttcacgctcaagctgacgacaagtatctaaaatcgctttatgctcagtttttgatgtgatgatgtgcttaccttttttctgataaaagtttgcaacaccttttagtgccaagttatctgcttcagttgcccctgaggtgaaaacaatttcacgaggatcagcaccaataagatcagcaatctgattacgagcgatatcgatcgcttcttcagcttgccatccaaaacggtgcgaacgagaggctgggttaccaaaaatgccgtcaatagtcaggcattgcatcattttttcagcaactcgaggatcaacgggtgtggttgctgaataatctagataaatgggtaatttcattgctcactaactccaaagacgacagatcttctttaataattttgttttgtttgcctagagatcgccgttaaactcgcatattaacaatggtttcttgtaaacgaccattgatagcatgacgtttttcattgtcttgacgatcagcgacatccataacctcttcgttattaactaactcttcaaggctaatgctgctaaggaaactggtaatacgatcacttaaatcacgccacaaagtatgagtcaggcaacgatcgccaccttgacatccttctttattaccctgacaacgggtagcatcaacagattcatcaactgctgaaatgacttgagcaacaaaaatttgccccgcttcacgaccgagtaaataaccaccacccgggccacgcacacttgcgactaattcatttttacgtaaacgtgaaaaaagctgctcaaggtaagaaagggaaatcccttgacgctcagaaatatcagcgagggggacagggccttgctgcgaatgcaatgcaacatcaagcatagcagtaactgcataacgcccttttgatgtcagtctcataacaaatactccgtggtgaacaatagtcaaattgtgtcattcctgagtaatttagtcaactatttatctgagtgttttagtcaggtattaagctcagcaacaatgacgcatgttaatcaacttaatcctttatttcttagcccatttttcaacggatgttaaaataccacgtaagatatgaagctcttgtgtttctggacgtgcgcgtgtaaacaaacggcgtaaacgactcatcacttgtcctggatgtttaggacgaataaaaccagactcattaagtacctgctctaagtgaacataaaagcgttcaatatcttcagcgggtggataatcaatctctgatgaagcattttcctcttgtttttcctgttgagcaagtgcagccatgcgaatttcataacaaacaagttgcaccgccatcgctaagtttaaagagccatattcagggttggtaggaatatagaggtggtaatcacatttttgtaattcttcattagttaagcctgtgcgttcacggccaaagatcaccgcaacgggcttatttgctgcctcttttacgcaacgttcaccacattcacgaggtgctagcattggccaagagagcgtacgattacgcgcacttgttccaatcactaacccacagccttcaatggcatcatcaatagtctcaacaatatgggcattgccaataacatcgcttgcccctgctgataaggctatagagtgagagtcgggtttttctttaggattaacaaaataaagattcgttaatcccatggttttcatagcacgagctgtcgagcccatattgcctgtatgtgaagtttcgacaaggataatgcgaatattttctaacattgatttctaactaattgttttatgatccatctattttatcacaaatgtagccaaaaacgcgaacgcctgttatacttcgcctcgttttttatccccgttctttaacatcttgtggaagataaccatgcatccgatgctgaatattgccatacgtgctgcacgtaaggctggtaatttaatcgccaaaaattacgaaaatcctgaatctgtagaaacgagccagaaaggtagcaatgattttgtcactaatgttgatcgcgaagcggaacaggcaatcattgaaatcattcgtaaatcttatccaaaacacaccattattacggaagaaagtggcgagttactcggtgaagatcacgatatccaatgggttatagatccacttgatggcaccactaactttattaaacgcctaccacatttttctgtttctatcgctgtacgtatcaaaggtcgcacagaagttgctgtggtttacgatcctatgcgtaacgaacttttctcagctgttcgtggtcaaggtgcacaattaaatgattaccgcctccgtggctctaatgcacgtgatttagatggtgctgttttagcaactggtttcccattcaaagcaaaacaacattcagcagcttatatgaatatgctgactaaactgtttgtaccatgcgctgattttcgtcgcacaggttcagcagcattagatttagcttatgttgccgcgggtcgtgtggatggcttctttgaaattggtttaaaaccttgggatttcttagcaggtgaacttattgctcgtgaagcgggtgcaattgtatctgactttactggtaatcacggctatctacaaactggtaatattgttgcgggtaatcctcgagttgtccgagcattattggcagaaattcgtagcgaattaactgatgctttaaaacgttaattgatacgaataacaataaaatataaaaaaactatcttaaaaaaactatcttataaaatgatccccagtagttggacagccaattactgggggtcttttttattgcctatgcgttttcaattaaaagggcatttactgaaagttggctaatttcttgtgcaatcttatctaatagttgtgatgttatctcttgcttattaacacgtaatagaaaagcttttcttgcaatgacaaaccctaatatctgaccaataagagcatgagcacgaatagtgattgttacttcatcactctttgtatccattaatccaactaagcgagaaaggcgaagatgaaaaggctctatcagattactataaataagatcgtaattttccgtcggttctaactgttcacgtaggatcaactgactgtaataatggcgttttggtgataataatgcacgagttaaacctgtgactagtaatagaactaattcagccactttttcatttttataaggtcggttttctttcaataaaaactgaagcttattatcaaattggtcaaactgaatttcagaggctaattctgtagcaatatatcggatcactgctgtataaacccctaattttccgccaaagtggtaaggtattgctgattgattaacaccagcatcttgcgcaagttgtcgcgttctcaatccactgatcccatatagtgcaaaaagcctaataccttcttgcactaatttctcttgagtttgttctgtacttactgcagttttactggtgtttttcattataatcaactggttactattaggactatatatctgcccgcattaattgtgttgagttagaatttaactcaatccctttgcttttgccaaccacaacagtgccacctaaattacataagtggtggccgaagccacaattaggctcaaaagcaaatgtcataccttcttgtaataccaattctctccctggattaggtaatcgctcaatttgtttataacgatgagcaagaggtaatgattcaatacctggcgctgtgccaaagccgattgggccataaggattaatactgtgaataagtggatgaacatgccatccccctgattctaatagtggtttttccattaaatcaacgacttcaccaaaggttatccctgcttttaaatgttcaacgccaatttcatagcattcacgtgcaactaatgctgctttttctaagttttcgtgaattttacctacagcaaccgccgcttgatgttgcgtttcatacattccatataaagcaaaaatctctgataatataatatcacccatttgaatttcacgaggtgattgtgagcgatattgccaagcaggaggcccccaaccgatatactcagatcctgatcccattaaaatttcagcggtaaatcctccccttgataaacaagtggcagtaattgcagccgcaagctccgcctctgttgcaccaggccttgctgtcactcgcattgcctcgctcattgcttcaccaatggcggcagcatatcttacatgagcgagctcttcttcacttttaactgatgcccgtctaaagaaatcacgatacacactgctaaattttgcataaggaaatgcttctttaataccatttagagtattaaatggcattgcaccatcaaaataaaatgggggataaggttctaagccaataataccaatatgtgcattttgttgtactcccatctcttttagaaaatgagcaatactacgccctgtttttcctacaacaagattatcttcatcaacccactgcaaatcaccacgtagttttgcctgcatatgatcagctatcatcattggtgcaaaagtaactatcaatggtttcttatcttcatgaaaaataacaaccgatcctaatctgtcatttgtaaaatagtggtcaatacagaacggtgcaggtgctgcagattctctatcaccataaataatcaatgtatctaattggttatctctcataatgtctctagctaactgccagcgtcggtctctttcttgtaaagaaaaactagctgggatcactgatttacttttcatagtaatacctttttttattcattcatttgaatgaattaaatttagctttaatatttaaaatgatcaatcgtttggttgatcaaaaaatgcgctttaaaaaataaaaagaaaaaaacctgtaatatcaaaaggtattacaggcttagacgtttatgaaaaataggaaataaaaagattaagtattttgcggttgtactttcggtctaataaacattgcaggaatagttaatgccgccatcaaccagaaaatgaggtattcttggttagggagtttttcatataaccatcccgatacaatcgtcataatagcgatacttccccccattgctagagcagaataaaccgcttgtaaacgaataatttcatgctcttgacgtgcagtaataaaacgcattgccgctaaatggcatacggtaaatgtgccactatgcaaaatttgtacaataataagtgccggtaatgctgtaaaactgcccatcatcccccagcgcaatagccctgcaaatgctgaaagtaataataagtttcgagcactccaacggcggaataaacgacggctaaacataaagacaaccacttcagcaactacgcctaaggaccaaagataaccaatcgttgctgtatcatagcctgctttttcccaatagagtgcgctaaaaccgtaataagcagcatgagcaccttgtagtaaagaaacacataatagaaaacgccagactgggccatctgaaatcagtttcataaatgaaacatgatggtgttccgcttttttgaccttaccttggggcatgattttcggacgtaacattgaggtaaggaataatgcaagagtactggcaatcaatccataaagaataatcgggtgtccaaaagcatcaatcaatatccccaataatgaggaactaataataaatgcaatagatccccaaacccgaatttttccataatctaaaggaaattgtttttgccatgttcccgcaagtgaatctcccaaaggcaccatgggtgcaaaaaaaacgttaaatccggtcattaccaaaaagagccaagcccaatgagtgcccaacataaatgcaacggtaaataggagagataaaaaagcaaaaagtcgcagtgcagtaatgagctttgatggatcttttacagccggcgttaaaatcaagcttcctacaaaacgagcggttaagcccaccccaagtagtaagcctatcatcgcaggatcaaccccctcgccctttaaccagatagaccaaaaaggcaagaaaataccatatgagaaaaaatacgtaaaataatctaaggcaagccacagtgttgatggaataaccatccaaccccccatttttaacatgcaaaaaaacccgccaagaacatgttctcgaagcgggcttgtataacgggttttattatatcgttacaaacttatgcgtaaactggaaatttagcgcagatatccaagactttttgtttcactttttcaatgttcgcttcatcattgatattatcaaggacatcacacatccaaccggctaaatcttttgcttccgcttctttaaaaccacgacgtgtaatcgcaggagaaccaatacgaataccagatgtaacaaatggactgcgaggatcatttggcacactatttttgttcacagtgatattagcacgacccagtgcagcatcagcatctttacctgtaatatctttatcaactaagtctaataaaaacaggtggttctctgtgccaccagatactactttataaccgcgcgctaagaaaacgtctaccattgctttcgcattttttgcaacttgttgctggtaaactttaaactcaggttccattgcttcttttaatgcaacggctttacccgcgatcacatgcattaaaggaccaccttgagagccagggaatacggcagagtttaatttcttataaaactcttcatcgccacccttagcaaggataagaccaccacgaggacccgctaatgttttgtgtgttgttgtagtcacaacgtgagcatgtggtactgggtttggatagacacccgctgcaatcatacctgcaacgtgagccatatcgacaaataagtaagcccctacgctatctgcgatttcacgcattttagcccaatcaaccaaacctgaataagctgaaaaaccaccaatgatcatttttggtttatgctttttagcttgctcagcgatatcttggtaatcaattttacctgcttcatcaataccataaggaacgatattgtagagtttaccagagaagttaaccggagagccgtgagttaagtgaccaccttgggccaaattcatccctaatactgtatcacccggtttaagtaatgccatatacacagccgcattcgcttgtgatccagagtgaggttgtacgtttgcataatcagcaccaaatagtgctttggcacgatcaatagctaattgttcaacaacatcaacgtattcacaaccgccgtagtagcgtttacctggataaccttctgcatatttgttggtcagctgagatccctgcgcctgcataacacgaggactagtatagttttcagaagcaattaattcgatgtgctcttcttgacgagtcacttcaccttccattgcattccataattccggatcgtaatcagcaatattcatttcacgttttaacattcacatctcctgactcagctaacttcactaaaggcgaactcccttacgggagtaagaatgacatacagtgtaaactctttttcctcattgagatagtcccaaaagaaaaaatacgcaatcgtttgctaagccactataacacagttctattactttttgataacctcattttatctgctgtttttgttctttttgaggcacatctcgctaatttatgtaaaccctcaacatcattctctaagatttccccattttcctaaaaaaaaataaaaactcagatttacaaataaagcaaaaagatataagttgtattaaaaatacatgttataaaaatcatattaaactgaatatttttcaggagcaattatgttagatgcacaaactatcgcgacaattaaatccactattcctcttattgctaaaacaggccccgcgttaacggcacatttttacgacagaatgttctctcgccatcctgagttaaaagatatttttaccatgagccaccaaagcagtggcgcacaacgtgaagcgttatttaatgcgatatgtgcttatgcaacgcaccttgaggatttacctgctattttgccggcggtagaaaaaattgcacaaaaacatgccagtttgaatattcttcctgaacattatcctattgttggagaaaacttattagccaccattgatgaaatgtttaacccgggcaaagaagtgcttgatgcttggggagccgcttaccaagttttggctgatgtttttattaatcgggaagagcaaatttatcaacaaaaagaacaagcatctggaggctggcgaggattacgtcactttaaagttaagcataaagtaaaacaaagtgaggttattaccagctttgaattagagcctgaagatggacaagcggttacaccttaccgtgcaggccaatatttaagtatttatattcgtgatgagaaacttgcaaatcaagaaattcgtcaatattccttaacgcaatcggcaaacaataaaacctatcgtattgcggtaaaacgtgaagacaagggaattttatctaattttcttcatgaccatatccaagaaggagacatcttacaagttgccgcaccagggggcgatttttatttagatatctcatcaacaacgcctgtcacattaatttcagcaggtgtaggcttaactcctatgttagcgatgttgcacactctctcttctcaccaagcacaagtcaattggttacatgcagcggagcatggtggcgtgcatgcttttaaggaagaaatcgcacaagcaggaaagcaaattgaacaatatcaacaagccgtatggtatcgtctccctcgtactgaagatataatcaataaagactatcaatttgaagggttgatggatttaaccaagatacatgaatggctatcaatacctaatatgcagttctatttctgtggtccattaccttttatgcaatctgtcgctaaacaacttattactctcggtattgaaagcgataaacttcattatgagtgctttggccctcatactgttattagccaataacagccagaataggtaagagaataaattaaataataaggaaaaagcgctgattattttactattcagcgctttttatattggaaaccactaactatttaataagtaacttttattgatgtcggtataacatgatatttagacgaatagcgataccaaataacactaattaaacagagtgtatagccgaacaactcgctaccttcttccaccatattttttactgtgcggttatagtcttcacctaacaatttctcccacaaaatccccataccaaataagcgagagaacagtaaaacactgagtaaacccgccataagcattccttgactagaatgcgttataaaatgggttaagccatataatgtttttttcccttctctgatagcgatcgctatacagacaaatgttaccgttaatgcaaaccaaacccatgaaccatgtgctaattggtcaaaaacaccatctaactcacgaattaagatacacaagaaaaagcccataatcagtgtgtatccccctctcatttctggctgtttataagcaggtataaagaaaagaagacatattatagccacaataagttcttgccccagttcggttgctgaggtttcagaaataccattattcagcaccaaaatatcgaggaaaataaaccctgttgttattgccacaatcatggcggaaaacaaaaataaagcaaaacgctttaataaatagctaagcacgatattacccatagaataataaatatttaagttgatgataataactgtctacaaaagttattgaataacattttgtgccttaaaaggtgagaattttagtaaaataaattgtttattatcatcaatagacttgtataagatataaatagcacaataggtgaaacataaaaaaacattttatgaacaaagaaagataattattaatattacttatttaatgagtataattatcagcaatacaaatcatttattatcacttataaatttataaaagataatcagtaaataaataaacttattgagataatataaaaaagaattaattaataaagataaaaaaacctgataattaaactaataatcatcaggtttcataaacaacgcttatttattttttaaatagcttcttcgtcttgctctccagtacgaatacggataactcgattcacatcaaaaacaaaaattttaccgtcgccaatcttccccgtttgagcggtagtcattatagtatcgacacaagtttcagctatttcatcagcaacaacgatctcaatttttactttaggtaaaaaatcgaccatatactctgcaccacgataaagttcggtatgccctttctgacgaccaaagccttttacctctgttaccgtcatacccgtgataccaacttcggctaatgcttctcttacatcatctaatttaaacggcttaattatcgcttcaatttttttcatcggattatcctgctattaccagttatggcgaccaaaaccgcttgtgatcggatagcgacgatctttaccaaaattacgactggtaatacgcggtcctaccggtgcttgacgacgcttatattcattaatatcgactaattttaccactttacgaacaatggcttcatcaaatccagccgcaaccaagtcagaaacagatttatcttgctcaacatagccttcaagaagggcatctaaaatatcataaggtggcagattatcttgatctgtttgtcctggtgctaattctgctgaagggggcctatcaatcacacgttgtggaatagcgggtgaaagagtattacgatatttagccagttcaaacaccagtgttttaggaacatcttttaaaacatcaaagccccccgccatatcaccatataaggtcgagtagcctacggcagattcacttttattactcgtggtgagcactaaccgacgacgtttattggacatcgccattaaaataacagcacgacaacgcgcttgtagattttcttctgtggtatcgacagcgctacctttaaacataggcgaaagttgatccataaaagcatcaaacatcggctcaatagagacagtatcaaactcaacacctaataaattagcttgctctttcgcatcgtgaatactcatttctgaggtatagcgaaatggcatcattaccgcttgaacgctctctttacctaatgcatcaacggcaattgcaactgttaagcctgagtcgatgccccctgataatcctaatatagcgcctttaaaaccattttttgtcacataatcacgcgttgccagcactagtgcttgataaacttgcgctaaaggagaaagctctggtgccgcatcttgcatcggtacgatagttaactcatcaaactccaccacggccacttgctcatcaaaagccgctaaacgatgggtgattgttcctcgctcatcaaagactttagaacatccatcaaaaaccaattcatcttgaccaccaatttgattgagatacaccacaggcagatgcgttctttggcaatgttctttaattaattgggtacgaatatgtggcttttcacgactataaggtgaagcattaatagaaagaaccagatcagcacccgcttgttttagtgcatcaataggctcgttgatccaaatatcttcacaaattaataatcctaaatgatagcctttaaaaggcacaacacaacgttcatttccttgctggaaataacgtttttcatcaaatacaccataattaggtagctgttgtttgaagtaacgcgcctgtaactcaccttgatagaaaaatgacagtgcattatagatagtaccgttttgccaccaaggatgcccaaccacaatggccgttttcttacttgcttgttctaaacgaaccagttgctcttcacaacgttgttggaaatcagggcgaaatagtagatcttcaggagagtaaccgcataacgcaagctcagaaaacaaaaccagatcggcatcttcttgcgcttttacggtggctaacatgcgttcacagttgccttcaatatcgccaacaacccagtttaactgagcaagtgcgagttttaatttacgactcataaaaattagtctctccagctatctttgctatctaaagaaagcaagtttaaaaaaatttttgttatctacaaagatcattctttgaaatcattggcatcaagtccatgacgtgacaacaatttataaaattctgttcgatttcgccctgccatccttgcagcttgagtgacattgccctttgtcatctgcaataacttccttaaataggtcatctcaaaatggcctcgtgcttcagcaaaagtaggtaatgcggtattttccccttgcaatgcttgtgtgacaagggcttcgctaatcacaggtgcagtcgttaaagcgacacattgctcgatgacgttaactaactgacgcacatttcccggccaacttgctgtcattaggcatttcatcgcatccgttgagaagctacgcacaaaaggtttatgtcgttttgctgattcgcgcaataaatggttagcaagaacaggaatatcctcggctctttcgctcaacgtggggatacgtaaattcaccacatttaaacgatagtataaatcttctcgaaattcattacgctccatcgcttttggtaagtcacggtgggttgcagaaagaatacgcacatcaatatcaatatcacgattactgcctaatggccgcactttacgctcttgtaatacacgcagtaatttcacttgcaatgccattggcatatcaccaatttcatccaaaaatagagtgcctccttctgccgcttggaaaagtccttcacgactacttaccgcgccagtaaaagcacctttagcatgcccaaatagttcagattctaataattgttcaggtaaagcaccgcagttaatagcaataaagggttttttagctcgtgggctggcgcggtggattgcttgagcaaggacttctttacctgtaccgctttgcccattaatcagtacgctaacatcggattgtgcaactaacttggcttgctctaataaacgtaacatttgggggctacgggtcacgatatcttttgaccactcttcatcagataccgtcgtcactaattctaatgcttcatcgatagctttataaagcgcatctctatcaacaggtttagtcaagaaactaaacaccccctgttgagttgccgcgacagcatcaggaatggagccatgtgcagttaaaataatcacaggcataccgggttgttggcgctgtatttctgcaaatagcgccataccatccatttcatccatacgtaaatcgctgatcaccagatcgattttttcttttaataatagtttaagtgcttcttgcccactttcagcggtaacgatatgaaacccttcacttgttaatcgcatacccagtagctttaataatcccggatcatcatcgacaagtaaaagattcgctgatttatggccagccatgcacattctccttatttagatcctgtttcagtaggtttaaccgttgcgctattctctttttctgtcgaggtatttttcgcatcaggttttacttgttctgcttttggtggttcaggtttaactgctgataccgaaggttgtgaaacctcattattttctttggttatcgattgctcacttgccgttgacttattggattgctccgctatcggtttatcggctggtttttctgcattactcgcatctgaagattgaacatcagatagtgcttcttcttgagaaatagcatccacagaagccccttgttttcggctcgataattgacgttcaatttgtgtgagactttcgagttttttacgtgtggtatttaactcatgctctaatgcattattttgttttttcagcaaatccattttattttccgtttctgtaacaaaacggcgattacgatttttctcatcagcgagagcaagcgtaagcgtttgattctcaatccaagtagataatagaacacgcatagagcttggaaattgcaattgatagctttctaataaaaccagctgagcacgacgttcagcaaccgtcattcccgctcgctctaataaaatacttttataaaaggcgccatcccatccggcaacgataacactactggcttgacgttgtgcttctgtagacataatacgctgtgtgcactcaatggtacgtaaccaaaatagcggattattgagcccttcatgataaaaagcagctaaagttttacattctgcccaacgataatcgatagttttttgtttaacaacgggggtttcaggctcaatattagcggtttcggtcagcgatttttgtgcacatccagcaagaaacataggcaacataatccaacacagatactgtttccagtgtgaagcgatcctcttaattgatgcaggggccatagataattgctcattagccagtgtctttcgctttaattttttatactgatgaaaagacacctgtttttgtgacctgatatgcattatttattctcagaaagtagcggtagttcaatacgaaaacagacatcagcatagtcagaatgaacaatatttaactcgccatccattcttttgatacagtcatgagcaatacttaaccccaaaccactcccttttacagcccctttacgtaatagagaaccttgaaaaaagggctcaaaaatcattttttgttctgattcagggatcggagtgcctttattggctatatcaataactattttctgttcaatttgataactagagatccagatattacccgattcagcgccatagtgcaccgcattcgagtagagattatcaataactcttgataataacgtcgtttctgctcgacattttttcagatcaagtgaaattatcgtcttaatgcctttcgctcgggcgggtaaactatgcgctaacaccacatcattcactaatgtggttaaatcaacttcctcaatttgctgaggtacttcggaaagtttacgattataatcaagtagttgctcaattaataattgaagttgtttactactattatcaagaatagctacgacttctttttgatctaaggttaaaggccctgctacttcatccgctaataattctgttccttcgcgcatactggctaacggtgtttttaactcatgagaaatatgacgtaaaaactcatggcgttgcgattctagccatgcaagacgttcacttaaccaaataatacgttgagctaaagagcgtaattcacgtggcccctgaaacgaattcaagttattatttaatgtacgcccttcccccaatcggttaatcattttttctatacctttaaccggaccgatgatcatacgggtaaataaggcaattaaaatcaggctaaaaacaaaaacaattaaactttgccaaccaaaataacgccctttttcagcaatagccatttgtagttgctcgccacgactaaaaataatctctttagttaacacgacaatgcggttattggcataagaaaattgctctaatgcttgttgcatttgagaagtgggttcactatttttgcattgaattgatttgagcgttttcaaagaagtattcaaggcttgtgcttctttagactcagaaagagggatgatagtctgctgcaaggtagagaacattttgctgtattgttgataacgctgttgatacatttcttcatcagttttatcacgcaatacacaatatcgtcgataatttccttccatttcaatagctaaattacgcatcacctcgctacgctcggtatccgctaacgcatttttattggtaatagcggcttggttactaagctgatccaaactttgataagcctgataggcaaggacgagaagcggtaacagcaccatccaaaatgccatgataaccaattgtcttaaagatcggggaaaaatacgccactttttcaatgaaatcatctcaacacctattagagtaatgcgatgctacatgacttaataacaagaaaaaagtccgacattgaaattcagataggaaaacgaacacaagcgagaacacgcaacaggctctagaaatgggagagcggaatatcttactgagatattccgctcgtcaatattcatctcttttctctctaaaagagaatgaaggtggtgcctcactccacgtgtcgccctgtgtttgataaggcccgaaggcgagtatcatgatgttggacggtaggcaccttactctggcgtcattcttggcttatgtggtatgttcccacccatattgtggaccgacataaaaagttgaatgagcaactgattaatataatgcacaaggcgtgccaacttttcgattaaaatcataaaacattaattttaaacgaaaaaatatttttatcttactaaaataaaaaacagccccaatttttgatagcgaaaaaatcaacaagctgtctccatttccagacaccgttaattaaaaaatattaaattattaaaattcaacaagttaaatgtcaccttttggcgacaatgaaaaaacgatgtgtcgtcgattttatacattgataattttttccttttatatcaacaaaataaagcccctctaacttgaggggctttgggttataacactgactcttttttattacatcattagtcaaattgctttctggcattacggaataagcgcatccaagggctatcttctccccaattttctggatgccaagaatggctcactgttctaaaaacgcgctcagggtgaggcatcatgattgttgagcggccatctgttgtggtaacagcggtgatcccttttactgatccgttagggtttaatgggtattgctctgttggttgaccatagtgatcaacaaaacgcagtcctactaaattttttgcttctaactgcgctaattgtgcagcgtcacgaaattcagcaaaaccttcaccatgagataccgcaattggcatctgtgaacccgccataccttgtaataatagcgacgggctatcagtcacttttactaagctaaagcgggcttcaaaacgctctgagcgattgcgtacaaagcgtggccataaatctgcccccggaataagctcggccaacgttgacatcatttggcaaccattacaaaccccaagtgataacgtatcttgacgtgcaaagaattgggcaaactcatcacgtaaacgatgattaaataaaatagatttagcccatccctcacccgcaccgagtacatcaccataagagaaaccaccacaagcaaccaatacatcaaaatcacttaatgagcgttgtgccgtatgtaaatcgctcatatgaacatcaatagcatcaaatccagcgcgatcaaaagctgctgccatttccacatgagagttaacaccttgctctcttaataccgcaatacgaggacgactgcctgtagcaatataaggcgccgcaatatcctctgcgggatcaaaggttaagtgaacatttaatcccggatcgtgactatcttgtttggcacgatgttcttcatctgcacattcaggattatcacgtaaacgttgcatttgccatgtcgtttcagcccaccagacacgtaatgtactacgcttttcatggtaaacttccgtttcacggctttgaataataatgtcatcacttggtgttgcttgccctaagtaatgtaaacaatctgctaaaccatgttcagtaaacagtgtttcaacgctttcttgatgctcccttttaatttggaacaccgcacctagctcttcattaaatagaccggctaaaatatcttcgtcataagcactgatatcaacattaaggccacaatgtcccgcaaacgccatttcggccaaagtcacaaataagccaccatcagagcggtcatgataagccagtaatttaccgtcgctcaccaattgttgaatgacattaaaaaactgttttaactgctctacatcacgtaaatcagccgctttttgtcctagctgacgataaacctgagctaatgctgttgcccctaatgcattatgaccattacctaaatcgattagatataaacggtttccttcttgggtagaaagctcaggggtgacagttttacgtacatcttcaacacgggaaaatgcggtgataactaaagagagaggggaaataacttctttcgttttcccttgttcatcttgccaacgcgttttcatggacattgagtccttacccaccggaatagtaatacctaattgtgggcatagctcttcaccaatggcttttactgcatcatataatcccgcatcttcaccagggtgacccgccgcagccatccagtttgcggaaagttttatacgattaagtgactgtacatcgcaacccgccatattggttaaggcttcacctaccgccattcgcgctgatgcggcaaaatctaatagtgcaataggggctctttcccctattgacatcgcctcgccgtaataactatctaatgtggccgttgttaccgcacagttagccaccggaatttgccaaggtccaaccatttggtcacgcgcaaccattcccgtaacactacgatcaccaatagtaattaagaacgtcttctcagcaacggcgggtaaatgaagtacgcgataaaccgcttcttttaaatcgatatctttacgatcgagatattcacctgctgttttatgtgatgtgacatcacgcaacattttcggcgctttacctaacaagatatctaaaggcatatctattggtttattatcaaaatgtgtatcatttaacactaactcacgctcttgtgttgcctcgccaatgacagcgtaaggggctctttctcgttggcatagcgcatcaaatagtggcattttttctggggataccgctaatacataacgctcttgcgactcattacaccagatctctagaggactcatacccggttcatcatttaaaacgttacgtaactcaaaacgacctccacgcccgccatcattgacaagctcaggcatggcattagaaagcccccccgctccgacatcatgaataaataaaatcgggttatcatcacctaattgccaacagcgatcgataacctcttggcaacgacgctccatttctgggttatctcgttgcacagaagcaaaatctaaatcagcatctgactggccggaagtcatagaagaagccgcaccaccgcctaggccgatattcatcgatgggccaccaagtacaattaacttagcacccacggagatctcacctttttgcacgtgatcttcgcgaatattaccaataccaccagccaacataataggtttatggtagcctcgaatttcaacaccattatgactattaacctgctcttcataggttctgaaataacctaataaggcggggcgaccaaattcattattaaatgcggctccacctaaagggccttctgtcataatgtccagtgcactgacaatacgttctggtctgccaaaatcttcttcccaaggttgttcaaaccccggaatacgtaagttagaaacggaaaaaccgactaaacccgctttaggttttgccccacggcctgtcgccccttcatcacgaatttcaccgccagagccggttgctgcaccaggccacggagaaattgccgttgggtgattgtgcgtttccactttcattaagatatggacaggctcttgatgataacggtaatgccctttttccgtatcgggataaaaacgcccagcaacggagccttccattacagcagcattatctttataagccgacaagacataatcaggagtttgctcaaaagtatttttaatcattttaaataatgatttgtcttgcgctttaccgtcgattatccaatctgcattaaaaattttatgacggcaatgctctgagtttgcttgagcgaacatataaagttctacatcagttggattgcgttgcaaacgtttaaaagcatctactagataatcaacttcatcatcagccagcgctaaccccatttcaatattggcagcaactagcgcatctttaccgtgagcaagaacatcaattgtttttaatggggtgggtgtctgttcagcaaatagcgcattaacttgttgataatcggtaaaaattgtttccatcatacgatcataaataaaaccgtataacaactgccactgttcttcggccatcgtatcgctatctatataataagcaataccacgttcaattctaaccacttgtgttaaaccacaattatgggcaatatctgtcgctttagtcgaccatggcgaaatggttcccggtcgtggtacaacaatacgcatctctccaacaagctcatgctctgttaatgaagggccatagtgcagtaacttgcttaatttagcttgttcatcttcagatagctgtccatccacttttacaaaatggataaactccgcataaataccacggacaggaagttggttttcctgacataaagttaatagtttattaatacgaaaagcggataaagcgggggagccacgcaggatttccataatattgagttctctcttttagcagctagcctgatcaatcattcaggggaaacgcgcctagtataatagaataactgctcagacgaaaccgtttgcgtgaacaaaataacagcatttaacttagcgtgttttcatcattaattggtgtaatcaagttgcgtcttagcaaaatgttgagcaaaatggtcgattactggaaatttatccatgtttaaatgactactttacacacaataaaaaacaacgttaacgagaaccaacctattgaacaatataaggattaactatttcgttatcgttatcatagcgctattttcagccgcgattattgcactgaatattacttggcctgacaggcaaaaagcgcagataaataagattttatctcgtggtgagcttagagtgagtactatcccttcaccactgataacgataaatgataaaaaggaccccgtaggtttcgattatgaattagtgaaacgctttgctgattatcttggcgtgaaacttgtcgttaatatgcggacgaatatcaaccaactctttgatgatctggagaataataaagcagactttattgccgctggattaatttataataaagaaaggctagatacgacacgaagtgggccagcctatttctcagtttctcaacaactgatctatcgtaaaggcacattgaggcctcgtcgttttgatgagcttaatgggcgccttgtcgtcgcagccggttcagctcatgccagcttattaaaaacattaaaagaaacgcaatatcctgaactcgaatgggaagaatcagagactaaaacgacttcacagctacttgaagagttatctgaaggtaaaataacttatgtactggccgattcaatcagcgtcgcggtacaacaacgcattcaccctaatgttgcagtcgcttttgaggtgacggaaagtcgtccattaacgtggtatttaccaaatcaagatgataatagtctgtatgcagccatgttggattacttcaatcaactttcccaagacgatgtgctcgcaagactagaagagaagtattttggtcatgttggttcatttgactactttgatacactctcttttattaccgccattgactcaatattacctaattatcaacctctgtttgaaaaatatgccgagacttttgattggcgtttattagcagcaatggcttggcaagaatcacattgggatccccatgccacgtcaccgacaggtgtaagaggcttaatgatgctaacacgtccaactgcgtcaagtatgggtataacagataggttagatcccgaagaaagtatcaaaggaggtgcacaatatttaaaacatcttctttctcgcctaccagatactatccctgatgatgaaaaaatctggtttgcacttgccgcttataacatgggatatggtcatatgttagatgcaagaaagctaaccgaacagcaaggcgccaatcctaatagctggttagatgtaaaagcgcggttacctttgctcagccaaaagaaatactatttagatcttccctatggttatgcgagaggacatgaagcttatcgttatgttgaaaatattcgtcgctatcaactcagtttagagggatacctacaagcaaaagagagtaaaaataagatcctatcgaaagacgaaaaagacgattcagccaatactgctttattaccgcctcgctccgtaggctcccccccttcatcttagttgtcaattatatagcctctttttaggggcttactaccctcgttttttattcatctaaccacaattttagcagcataatcctctctataccgtgccataacttggtatcctccccccttgaaggacgggttttactgcgaacttgataaaaaatgttactattttaatactttttttattaaaaatagttaaattactcatgttaaaaaaaataacaaattaatctaaaaccactcacagaatgagtaatttgacttaaaaacaaccaataaggctatttttagtacattggaataggttatatataagaaaatattaatataaatacttaatcattatctcactatttactattcattttgttattaatttcttacaaaaatcttatttatctatgaaaattaactttattattacaaataaagcttataaataactgaaaaatatactttattatattttattattagttttattaatttttttaaagttatgttaataacagcatagtttataacgttaatataatgttaatcatcatatctattaaatttctctgccatataaacttttttacccgtattaggagtaataaagggaatatttctatataaaaaactattaaaaaggaatttatagattaaaatatgaaaattgcacaaactaacaaaatcttatatcactgatagtatttttactgatatcatataaaccagtcattatccgacttgatgaaaaatgtaatgtacatcaatttttacatttggacatcaatactatttttatttttagtcaataataatacgtactaccttcaagggatcatctataatgaaactgagtaaaattgctttggctgcggctttagtatttggtattaattctgttgctacagctgaaaatgaaacgcctgcaccaaaagtaagttcaactaaaggcgaaattcaattaaaaggtgaaattgttaattcagcatgtggattagcagcatcttcaagccctgtaattgttgatttcagtgaaattccaacttctgcattagcaaatctgcaaaaagcaggaaatatcaaaaaagatattgaattacaagactgtgatacaactgtagcgaaaactgccacagttagctatacaccaagtgttgttaacgctgtaaataaagatttagcctcttttgtttctggtaacgcatctggcgcaggtattggcttaatggatgcaggtagtaaagcagttaaatggaatactgcaactacaccagtacaattaattaacggtgtatctaaaatcccattcgttgcttatgttcaagctgaatcagctgacgctaaagtaacgccaggtgaattccaagccgttatcaacttccaagttgattatcagtaatcatattgatttaaatatctaaattaataaataagtaattactgcgaaaacgcagaggatttcctctgcgttaaattcaataaaacacttcaatttaataaaaataaaaagtaattaaataaatatttattatttaattactttttatttaatataataattaggcgtttattcatgttaattccttattcaccccacacaatatggaagaccatttgtgcgactttgctattaagcttggcgtttttctcacaagcagagcaggacgattctgtggaatttaacattcatatgctagacgcggaagatcgcgataatgtcgacctttcacgtttttctacctcaaattatatcattccgggtatgtactatttagatattcgtctaaatggtcgcgactttcctcgccaaaatattaattatattgaagtagcagataatcattccgtggcttgtatcgaccctactcttttaaaaaagttaacaatcaaccaagaaaaccaaaaatatatcaaacaaatatcaccagattgttttgatattagccaattacccggtatctcgattaaaaatgatggtggtgtacttgatatcacgttaccgcgctcattaatgaaatatgaagaatctgattggacacctccggagctttgggatagcggggtctctgggcttatttttgattatacactaacaggaacgtcaactcgccctaataaaggcaataataacaatacgttaactggttatggtcaagcgggattaaacttgggtgaatggcgtttacgagctgaatatcaaggcaattattcttctgaatattcatctaacaatcgttttgattggaaccaaatttatgcctataagccattacctgatctcgcagctaaattaacggttggggaaacttatttaaactctcaaatttttgatagtttccgttttacaggagccaatttacaaagcgatgagagaatgttacccccttctctccaaggctatgcacctgaaattcatggcatcgccaataccaatgcaaaagtgacggtaacccaaaatggacgtttaatttatgagacaaccgtacctgctggccctttcgtgattaaccatctacaaaataccgtacagggtcaactcgatgttagagttgaagagcaaaatggtaagattaacgaatttcaagtgcaaaccgctaatttgccttatatgactcgcccaggatctgtgcgttttaatacctcactgggacagtcatccgtgaacaaccataaaatgcaaggccctcttttctatcaaggggatttttcatgggggatgaataatacatggtctctctatggtggtactttacttaccgctaaagattataacgcatggtctttaggtatcggccatgatatgggacgttttggtaccctttctggtgatattacacagtcttatagcaaaacctatgataatgaaaaaatcaatgggatgtcttttaaactaaactatgcaaaaacttttgatgagtaccacagtaccattacttttgcaggttatcgtttctcagaaaaaacatttcgctctttttctcagtatattgatgagcgttataacggcatcaataataatggctatgaaaaagaaatgtacaccattaccggtaataaaactttttgggcagatgatgcagagaaatcgaccaccctctatctctcttatcgccaccaaaattactgggataaaaatactcaagagcagtatggtgtcacagtaagtcgtaatttttccattatggggattgagcaaatcaataccaacttgtcagcatttcgtacccaatataaagggaatactgacgatacgctctcttttaatatttcactaccattaggaagtggtcgcaatattggttataacttgcaagataacaatggcaaagtgacacaaatggcctcttatgctgataatcgcgattataataatttatggcgcataagagcaggcttaagttcggataagaaagccaataccgatggttattatcaacatcgttctcagtatgcagaaatcaatgccaatgcaagctatcaacaagataattacttagcagtgggcgcaacgataaaaggcggttttactgctactcgttatggcgctgcattacacagtagcagtatgacctctagcaccgcaagaataatggtggatactgatggtgttgcaggggtgccctttaatggtcaaagcacgactacgaaccgcttcggcattggcgtactaaccgacttaacaagttataacaatgttgatgcacgtattgacgtcgataagatggatcaagatatcgaaacgcgtaaagccattgcttcaacaaccttaacagaaggtgccattggttattaccaatttccggttcgtcaaggtgaacgcttaatggctgtcttacagacaactgataataaataccctccttttggtgcggaagtcaccaatcaaaaaggggaaagtattggtatggtgatggaagaaggccttgtttatattgcgggtgttaaccttaatgaatcattaaatgtaatttggaacggtaaaacacaatgttcaattaccattcccgcggaaataacagatcccttaaaacatcaatcgctcgtttgtcaggatcgttaacaaataaaattaataatgagagataattaacatgaactcattcagcacactaaaaacactattttgtggctctttgctggcactgagtctagtgaatacaacacaagcgggtgtttcactggatagaactcgtattgtattaacgggtaatgaaaactcagccagtgttaatttaaaaaataccagccctgatattccttttttagcgcaatcttgggttgaaaatgaaaatgggcagaagatctcttcacccttagtggcacttccaccgttacaacgccttgatggtgctcaaaaaggcgtagttcgcattacaaaaacagctgaagttgggctattacctcaagatagagaatcactgttttatttaaatgtgcgtgaaattccccccgcaccaaaacaagccaacgtattacagatggcgatgcagtcacgcattaaattattctatcgtcctagtgccatagtacctgaaaaaccgggaatggtttggcaagatcaactggtgtttaaaaaacaaggtaataaatttattgttaataatccaaccccttattacatcacgattatctcactttctaataaattaaatggtgaggatagcgataaattaaccaccttccccggattaatggttgcgccaaaagcttcactggatataccagtaaaaaccagtaacgttaatcagttttatatgatgtatgtaaatgattacggtggacacccagagctcaaatttgtatgtcagcaagatagctgcaaagtagcccctaaagatcaacaacctaaatattaataaacttgatgccggtaggaataaaatgatcctcaataaaaaaaacattcattccaaatcagtaatgctattttgtgccggcattgtttctttaatgccattgcacgcaattgcttatttacaaggtgaagtgagaaccaatggtggccctaatattttctatgccgtattagatcacaccacctttcctaataacaaagcgggagaattagcaacagtaaacttttcgttgcctgatcgctatgatggcacggtatattgtcctaactcacgtatttatgatcgtgcattaacctattttaaagcaaccactgatttacctcctgttggtaataacttttatcaattaaatgagtatgttgatatcaaaattaattttgaaatttgggggcctaatcctttacccacagtgcccttttctgacatacctaataatagaaataaccaacaaggttgcagagtaccctcttcacctaaaccgcatatttcctcaggaagtagcggtcaactcactttccgtttaagaaaacccattattaatggtgtcagtcttaatgggcaatctcttgcacaaatgtatgccatggtaagtcacagcggtgcgccaaaaacctatggttcagagcccatttctaaattagtgatcacctcggggatcattaccactaaagataaatgtatttttaataatggttcaccaattacctttgactttggtaatgtgggaaatacctctgattatctcaatggacaaaactacaaaattactcgcaacatccccatcaaatgcgaagggggaagttttaccgatcctaatagcagaataatgtttaaagttcagactggtagctcaggtattgcgagttttgattctaactaccttggtacaacaggctctgtagatagaagtaacttaggtatcgtattaagagataagtcaggtacgattatcccacctaaccaatatttttcagttggcaaactcaataatttcaacggaaattgggaagtaagtgcagcccccatcgccaaagcgggcagtaaaattactgaaggtgaattttcagctcatgcgacactcattgcggagtttatgtaatgaaaaacagcataataaagtcagctataacttgcttgttattgctctctcctagcacttttgctgccactgatattattggtggagagatggaatttaaaggtgttgttgttgcacatggttgtacgattgttgcgggagatgaaaataaagttattgatttcaaacaaatatctgcaaaagatctctattcactacaaaaaagcaaccccgttgcttttagtatcagtttagaaaattgtagccaagatatttataaaagtgtcactatcacattagatggtcaagcacattcaacaatgcccaatcatatagccgttactgggagtggctcagaagatccgaaaagtattggtatcgcttttaccgacaaggcacataatattattgaattaaaaaaaccaagtgcccctcaacagcttaataataaacgagtacaatttaattttatggcctatgttgaagcaacatcatcagctattcaaaatcaaacgatactcacaggaccatttcaagcacaagcaacctatacactcaattaccaataacaattaagccaaatagatgctatttggctttctcttgtatgattaaaccttgagtaattaaacgttgctgttgtttcagttgttttttctctgcccttctcatcttaaaaaactggctcaagagttgtgcacactcctcacctaaaacacccgatgttatttcaactttatggttcatcccgggatgttgcaaaatatcaataaatgagcctgcggcacctgtttttagatcagatgcaccatagaccactctttttacacgactatgtacaattgctccagcacacataacgcaaggctctaacgtgatatataatgtggcgtcaagtaggcgataattctgtagatgtttcccacctttacgcaatgccataatttccgcatgtgcagtaggatcattatcaataatggagtgattccaacctttagcaatgattttattctcagcgactaacacggctcctacaggaatttcaccgagttgttgtgctttatgtgcctgctcaatcgctttatgcatccaataaatatcatctttaattttattcacaagaacatctcttcattattatacagcgcggtattgtagcctgttttagattgataactaaagatattagcgtgtgaaatgttgtaaaagatattcccctctgcaacatcaatatatttagaatctttcacgtatatgataatctcacactcttttgtatataattgtgtatttattttgtgtggcagtgctctattatttgtagtaacactgtcaatttgcagtaaaaatacaaccaataaactaaaagtaacatataagtgcaagatataagttactgtaatttaataatttatatattaagtgactgatatggctttactaattacgaagaaatgcatcaactgcgatatgtgtgaacccgaatgtcctaacgatgccatttcaatggggaatgatatttatgaaatcaatcctgatctttgcactgaatgtgtaggacattatgataaaccgacttgtcagtcggtatgccctatcacgaatacaattatcatcgatcctgctcatactgaatcgcaagatgaattatgggaaaagtttgtactgatccaccacgctgacaaaatctaagcaaacgcaatcgggaataaatttaagcgttatttttctaaaataacggttgcacaggcgtaacgttgctcatcagccagtgtcacgtgaatagcatttattcccgctttttgcgccatctcttttgccacagctaaaaactgcaatgttggtttacctaattcatcattagcgacttcaaaatggttaaatgc

(The sequence listing continues in the following parts.)
